(19) United States
(12) Patent Application Publication
(10) Pub. No.: US 2023/0226212 A1
(43) Pub. Date: Jul. 20, 2023

(54) MUSCLE-TARGETING COMPLEXES AND USES THEREOF

(71) Applicant: Dyne Therapeutics, Inc., Waltham, MA (US)

(72) Inventors: Romesh R. Subramanian, Framingham, MA (US); Mohammed T. Qatanani, Waltham, MA (US); Timothy Weeden, Waltham, MA (US); Cody A. Desjardins, Waltham, MA (US); Brendan Quinn, Boston, MA (US); Jason P. Rhodes, Waltham, MA (US)

(73) Assignee: Dyne Therapeutics, Inc., Waltham, MA (US)

(21) Appl. No.: 17/791,667

(22) PCT Filed: Jan. 8, 2021
(86) PCT No.: PCT/US2021/012764

§ 371 Date: Jul. 8, 2022

Related U.S. Application Data
(60) Provisional application No. 63/132,929, filed on Dec. 31, 2020.
(60) Provisional application No. 63/069,067, filed on Aug. 23, 2020.
(60) Provisional application No. 63/061,836, filed on Aug. 6, 2020.
(60) Provisional application No. 63/055,521, filed on Jul. 23, 2020.
(60) Provisional application No. 62/980,925, filed on Feb. 24, 2020.
(60) Provisional application No. 62/968,411, filed on Jan. 31, 2020.
(60) Provisional application No. 62/965,754, filed on Jan. 24, 2020.
(60) Provisional application No. 62/959,804, filed on Jan. 10, 2020.

(51) Int. Cl. A61K 47/68; A61P 21/00

(52) U.S. Cl. CPC A61K 47/6849; A61K 47/6807; A61K 47/6889; A61P 21/00

(57) ABSTRACT

Aspects of the disclosure relate to complexes comprising a muscle-targeting agent covalently linked to a molecular payload. In some embodiments, the muscle-targeting agent specifically binds to an internalizing cell surface receptor on muscle cells. In some embodiments, the molecular payload inhibits activity of a disease allele associated with muscle disease. In some embodiments, the molecular payload is an oligonucleotide, such as an antisense oligonucleotide or RNAi oligonucleotide.

### RELATED APPLICATIONS

[0001] This application claims the benefit under 35 U.S.C § 119(e) of the filing date of U.S. Provisional Application No. 63/132,929, entitled “MUSCLE-TARGETING COMPLEXES AND USES THEREOF”, filed Dec. 31, 2020; U.S. Provisional Application No. 63/069,067, entitled “MUSCLE-TARGETING COMPLEXES AND USES THEREOF”, filed Aug. 23, 2020; U.S. Provisional Application No. 63/061,836, entitled “MUSCLE-TARGETING COMPLEXES AND USES THEREOF”, filed Aug. 6, 2020; U.S. Provisional Application No. 63/055,521, entitled “MUSCLE-TARGETING COMPLEXES AND USES THEREOF”, filed Jul. 23, 2020; U.S. Provisional Application No. 62/980,925, entitled “MUSCLE-TARGETING COMPLEXES AND USES THEREOF”, filed Feb. 24, 2020; U.S. Provisional Application No. 62/968,411, entitled “MUSCLE-TARGETING COMPLEXES AND USES THEREOF”, filed Jan. 31, 2020; U.S. Provisional Application No. 62/965,754, entitled “MUSCLE-TARGETING COMPLEXES AND USES THEREOF”, filed Jan. 24, 2020; and U.S. Provisional Application No. 62/959,804, entitled “MUSCLE-TARGETING COMPLEXES AND USES THEREOF”, filed Jan. 10, 2020; the contents of each of which are incorporated herein by reference in their entirety.

### FIELD OF THE INVENTION

[0002] The present application relates to targeting complexes for delivering molecular payloads (e.g., oligonucleotides) to cells and uses thereof, particularly uses relating to treatment of disease.

### REFERENCE TO SEQUENCE LISTING SUBMITTED AS A TEXT FILE VIA EFS-WEB

[0003] The instant application contains a sequence listing which has been submitted in ASCII format via EFS-Web and is hereby incorporated by reference in its entirety. Said ASCII copy, created on Jan. 8, 2021, is named D082470032WO00-SEQ-ZJG and is 1930 kilobytes in size.

### BACKGROUND

[0004] Muscle diseases are often associated with muscle weakness and/or (e.g., and) muscle dysfunction that lead to life-threatening complications. Many examples of such diseases have been characterized, including various forms of muscular dystrophy (e.g., Duchenne, facioscapulohumeral, myotonic, and oculopharyngeal), Pompe disease, centronuclear myopathy, familial hypertrophic cardiomyopathy, Laing distal myopathy, Fibrodysplasia Ossificans Progressiva, Friedreich’s ataxia, myofibrillar myopathy, and others. These conditions are generally hereditary, but can arise spontaneously. These conditions are often congenital but can arise later in life. Many rare muscle disease are single gene disorders associated with gain-of-function or loss-of-function mutations, which may have dominant or recessive phenotypes. For example, activating mutations have been identified in genes encoding ion channels, structural proteins, metabolic proteins, and signaling proteins that contribute to muscle disease. Despite advances in understanding the genetic etiology of muscle disease, effective treatment options remain limited.

### SUMMARY

[0005] According to some aspects, the disclosure provides complexes that target muscle cells for purposes of delivering molecular payloads to those cells. In some embodiments, the complexes of the present disclosure facilitate muscle-specific delivery of molecular payloads that target muscle disease alleles. For example, in some embodiments, complexes provided herein are particularly useful for delivering molecular payloads that modulate the expression or activity of a gene in a subject having or suspected of having a muscle disease associated with the gene (e.g., a gene/disease of Table 1). In some embodiments, complexes provided herein comprise muscle-targeting agents (e.g., muscle targeting antibodies) that specifically bind to receptors on the surface of muscle cells for purposes of delivering molecular payloads to the muscle cells. In some embodiments, the complexes are taken up into the cells via a receptor (e.g., transferrin receptor) mediated internalization, following which the molecular payload may be released to perform a function inside the cells. For example, complexes engineered to deliver oligonucleotides may release the oligonucleotides such that the oligonucleotides can modulate expression or activity of a muscle disease allele. In some embodiments, the oligonucleotides are released by endosomal cleavage of covalent linkers connecting oligonucleotides and muscle-targeting agents of the complexes.

[0006] In some embodiments, methods are provided for treating a subject diagnosed as having a muscle disease associated with a disease allele (e.g., a gain-of-function disease allele). In some embodiments, the methods involve administering to the subject a complex comprising a muscle-targeting agent covalently linked to a molecular payload configured to inhibit expression or activity of the disease allele. In some embodiments, the muscle-targeting agent specifically binds to an internalizing cell surface receptor on muscle cells of the subject. In some embodiments, the muscle disease is hereditary, and may exhibit increased severity in sequential family generations of the subject. In some embodiments, the subject has been diagnosed as having the muscle disease based on a genetic analysis of the disease allele. In some embodiments, the subject exhibits progressive muscle weakness and/or (e.g., and) sarcopenia prior to the administration. In some embodiments, the subject exhibits myotonia prior to the administration.

[0007] Some aspects of the present disclosure provide complexes comprising an anti-transferrin receptor antibody covalently linked to a molecular payload configured for modulating expression or activity of a muscle disease gene. In some embodiments, the anti-TfR antibody comprises a heavy chain complementarity determining region 1 (CDR-H1), a heavy chain complementarity determining region 2 (CDR-H2), a heavy chain complementarity determining region 3 (CDR-H3), a light chain complementarity determining region 1 (CDR-L1), a light chain complementarity determining region 2 (CDR-L2), a light chain complementarity determining region 3 (CDR-L3) of any of the anti-TfR antibodies listed in Table 2, 4, and 7.

[0008] In some embodiments, the antibody comprises a CDR-H1, a CDR-H2, a CDR-H3 of a heavy chain variable region (VH) comprising the amino acid sequence of SEQ ID NO: 15, and a CDR-L1, a CDR-L2, a CDR-L3 of a light chain variable region (VL) comprising the amino acid sequence of SEQ ID NO: 16. In some embodiments, the antibody comprises a CDR-H1, a CDR-H2, and a CDR-H3 of a VH comprising the amino acid sequence of SEQ ID NO: 204, and a CDR-L1, a CDR-L2, and a CDR-L3 of a VL comprising the amino acid sequence of SEQ ID NO: 205. In some embodiments, the antibody comprises a CDR-H1, a CDR-H2, and a CDR-H3 of a VH comprising the amino acid sequence of SEQ ID NO: 7, and a CDR-L1, a CDR-L2, and a CDR-L3 of a VL comprising the amino acid sequence of SEQ ID NO: 8. In some embodiments, the antibody comprises a CDR-H1, a CDR-H2, and a CDR-H3 of a VH comprising the amino acid sequence of SEQ ID NO: 23, and a CDR-L1, a CDR-L2, and a CDR-L3 of a VL comprising the amino acid sequence of SEQ ID NO: 24.

[0009] In some embodiments, the antibody comprises a CDR-H1 of SEQ ID NO: 155, a CDR-H2 of SEQ ID NO: 156, a CDR-H3 of SEQ ID NO: 157, a CDR-L1 of SEQ ID NO: 158, a CDR-L2 of SEQ ID NO: 159, and a CDR-L3 of SEQ ID NO: 14. In some embodiments, the antibody comprises a CDR-H1 of SEQ ID NO: 194, a CDR-H2 of SEQ ID NO: 195, a CDR-H3 of SEQ ID NO: 196, a CDR-L1 of SEQ ID NO: 197, a CDR-L2 of SEQ ID NO: 198, and a CDR-L3 of SEQ ID NO: 193. In some embodiments, the antibody comprises a CDR-H1 of SEQ ID NO: 145, a CDR-H2 of SEQ ID NO: 146, SEQ ID NO: 263, or SEQ ID NO: 265, a CDR-H3 of SEQ ID NO: 147, a CDR-L1 of SEQ ID NO: 148, a CDR-L2 of SEQ ID NO: 149, and a CDR-L3 of SEQ ID NO: 6. In some embodiments, the antibody comprises a CDR-H1 of SEQ ID NO: 165, SEQ ID NO: 267, or SEQ ID NO: 269, a CDR-H2 of SEQ ID NO: 166, a CDR-H3 of SEQ ID NO: 167, a CDR-L1 of SEQ ID NO: 168, a CDR-L2 of SEQ ID NO: 169, and a CDR-L3 of SEQ ID NO: 22.

[0010] In some embodiments, the antibody comprises human or humanized framework regions with the CDR-H1, the CDR-H2, the CDR-H3 of a VH as set forth in SEQ ID NO: 15, and the CDR-L1, the CDR-L2, the CDR-L3 of a VL as set forth in SEQ ID NO: 16. In some embodiments, the antibody comprises human or humanized framework regions with the CDR-H1, the CDR-H2, the CDR-H3 of a VH as set forth in SEQ ID NO: 204, and the CDR-L1, the CDR-L2, the CDR-L3 of a VL as set forth in SEQ ID NO: 205. In some embodiments, the antibody comprises human or humanized framework regions with the CDR-H1, the CDR-H2, the CDR-H3 of a VH as set forth in SEQ ID NO: 7, and the CDR-L1, the CDR-L2, the CDR-L3 of a VL as set forth in SEQ ID NO: 8. In some embodiments, the antibody comprises human or humanized framework regions with the CDR-H1, the CDR-H2, the CDR-H3 of a VH as set forth in SEQ ID NO: 23, and the CDR-L1, the CDR-L2, the CDR-L3 of a VL as set forth in SEQ ID NO: 24.

[0011] In some embodiments, the antibody comprises a VH comprising an amino acid sequence at least 80% identical to SEQ ID NO: 15, and a VL comprising an amino acid sequence at least 80% identical to SEQ ID NO: 16. In some embodiments, the antibody comprises a VH comprising an amino acid sequence at least 80% identical to SEQ ID NO: 204, and a VL comprising an amino acid sequence at least 80% identical to SEQ ID NO: 205. In some embodiments, the antibody comprises a VH comprising an amino acid sequence at least 80% identical to SEQ ID NO: 7, and a VL comprising an amino acid sequence at least 80% identical to SEQ ID NO: 8. In some embodiments, the antibody comprises a VH comprising an amino acid sequence at least 80% identical to SEQ ID NO: 23, and a VL comprising an amino acid sequence at least 80% identical to SEQ ID NO: 24. In some embodiments, the antibody comprises a VH comprising the amino acid sequence of SEQ ID NO: 204 and a VL comprising the amino acid sequence of SEQ ID NO: 205.

[0012] In some embodiments, the equilibrium dissociation constant (KD) of binding of the antibody to the transferrin receptor is in a range from 10-11 M to 10-6 M.

[0013] In some embodiments, the antibody is selected from the group consisting of a full-length IgG, a Fab fragment, a F(ab′) fragment, a F(ab′)2 fragment, a scFv, and a Fv. In some embodiments, the antibody is a Fab′ fragment.

[0014] In some embodiments, the molecular payload is an oligonucleotide.

[0015] In some embodiments, the oligonucleotide comprises at least one modified internucleoside linkage.

[0016] In some embodiments, the at least one modified internucleoside linkage is a phosphorothioate linkage.

[0017] In some embodiments, the oligonucleotide comprises one or more modified nucleotides.

[0018] In some embodiments, the one or more modified nucleotides are 2′-modified nucleotides.

[0019] In some embodiments, the 2′ modified nucleotide is selected from the groupconsisting of: 2′-O-methyl (2′-O-Me), 2′-fluoro (2′-F), 2′-O-methoxyethyl (2′-MOE), and 2′, 4′-bicyclic nucleosides. In some embodiments, the 2′,4′-bicyclic nucleoside is selected from: locked nucleic acid (LNA), ethylene-bridged nucleic acid (ENA), and (S)-constrained ethyl-bridged nucleic acid (cEt).

[0020] In some embodiments, the oligonucleotide is a gapmer oligonucleotide that directs RNAse H-mediated cleavage of an mRNA transcript encoded by the muscle disease gene in a cell.

[0021] In some embodiments, the oligonucleotide is a mixmer oligonucleotide.

[0022] In some embodiments, the oligonucleotide is an RNAi oligonucleotide that promotes RNAi-mediated cleavage of a mRNA transcript encoded by the muscle disease gene.

[0023] In some embodiments, the oligonucleotide is phosphorodiamidate morpholino oligomer.

[0024] In some embodiments, the antibody is covalently linked to the molecular payload via a cleavable linker. In some embodiments, the cleavable linker comprises a valine-citrulline dipeptide sequence.

[0025] Other aspects of the present disclosure provide methods of delivering a molecular payload to a cell expressing transferrin receptor. In some embodiments, the methods comprise contacting the cell with the complex described herein.

[0026] Other aspects of the present disclosure provide methods of inhibiting expression or activity of muscle disease gene in a cell. In some embodiments, the methods comprise contacting the cell with the complex described herein in an amount effective for promoting internalization of the molecular payload to the cell.

[0027] Further provided herein are methods of treating a subject having a muscle disease. In some embodiments, the methods comprise administering to the subject an effective amount of the complex described herein. In some embodiments, wherein the muscle disease is a disease listed in Table 1.

### BRIEF DESCRIPTION OF THE DRAWINGS

[0028] FIG. 1 depicts a non-limiting schematic showing the effect of transfecting Hepa 1-6 cells with an antisense oligonucleotide that targets DMPK (control DMPK-ASO) on expression levels of DMPK relative to a vehicle transfection;

[0029] FIG. 2A depicts a non-limiting schematic showing an HIL-HPLC trace obtained during purification of a muscle targeting complex comprising an anti-transferrin receptor antibody covalently linked to a DMPK antisense oligonucleotide.

[0030] FIG. 2B depicts a non-limiting image of an SDS-PAGE analysis of a muscle targeting complex.

[0031] FIG. 3 depicts a non-limiting schematic showing the ability of a muscle targeting complex (DTX-C-008) comprising control DMPK-ASO to reduce expression levels of DMPK.

[0032] FIGS. 4A-4E depict non-limiting schematics showing the ability of a muscle targeting complex (DTX-C-008) comprising control DMPK-ASO to reduce expression levels of DMPK in mouse muscle tissues in vivo, relative to a vehicle experiment. (N=3 C57B1/6 WT mice)

[0033] FIGS. 5A-5B depict non-limiting schematics showing the tissue selectivity of a muscle targeting complex (DTX-C-008) comprising control DMPK-ASO. The muscle targeting complex (DTX-C-008) comprising control DMPK-ASO does not reduce expression levels of DMPK in mouse brain or spleen tissues in vivo, relative to a vehicle experiment. (N=3 C57B1/6 WT mice)

[0034] FIGS. 6A-6F depict non-limiting schematics showing the ability of a muscle targeting complex (DTX-C-008) comprising control DMPK-ASO to reduce expression levels of DMPK in mouse muscle tissues in vivo, relative to a vehicle experiment. (N=5 C57B1/6 WT mice)

[0035] FIGS. 7A-7L depict non-limiting schematics showing the ability of a muscle targeting complex (DTX-C-012) comprising an anti-transferrin receptor antibody (a 15G11 antibody) and control DMPK-ASO to reduce expression levels of DMPK in cynomolgus monkey muscle tissues in vivo, relative to a vehicle experiment and compared to a naked DMPK ASO (control DMPK-ASO). (N=3 male cynomolgus monkeys).

[0036] FIGS. 8A-8B depict non-limiting schematics showing the ability of a muscle targeting complex (DTX-C-012) comprising an anti-transferrin receptor antibody (a 15G11 antibody) and control DMPK-ASO to reduce expression levels of DMPK in cynomolgus monkey smooth muscle tissues in vivo, relative to a vehicle experiment and compared to a naked DMPK ASO (control DMPK-ASO). (N=3 male cynomolgus monkeys).

[0037] FIGS. 9A-9D depict non-limiting schematics showing the tissue selectivity of a muscle targeting complex (DTX-C-012) comprising an anti-transferrin receptor antibody (a 15G11 antibody) and control DMPK-ASO. The muscle targeting complex comprising DMPK-ASO does not reduce expression levels of DMPK in cynomolgus monkey liver, kidney, brain, or spleen tissues in vivo, relative to a vehicle experiment. (N=3 male cynomolgus monkeys).

[0038] FIG. 10 shows normalized DMPK mRNA tissue expression levels across several tissue types in cynomolgus monkeys. (N=3 male cynomolgus monkeys)

[0039] FIGS. 11A-11B depict non-limiting schematics showing the ability of a muscle targeting complex (DTX-C-008) comprising control DMPK-ASO to reduce expression levels of DMPK in mouse muscle tissues in vivo for up to 28 days after dosing with DTX-C-008, relative to a vehicle experiment and compared to a naked DMPK ASO (control DMPK-ASO).

[0040] FIG. 12 shows that a single dose of a muscle targeting complex (DTX-C-012) comprising an anti-transferrin receptor antibody (a 15G11 antibody) and control DMPK-ASO is safe and tolerated in cynomolgus monkeys. (N=3 male cynomolgus monkeys).

[0041] FIGS. 13A-13B depict non-limiting schematics showing the ability of a muscle targeting complex (DTX-C-008) comprising control DMPK-ASO to reduce expression levels of DMPK in mouse muscle tissues in vivo for up to twelve weeks after dosing with DTX-C-008, relative to a vehicle treatment; and compared to a control complex (DTX-C-007) and naked DMPK ASO (control DMPK-ASO). (N=5 C57B1/6 WT mice)

[0042] FIGS. 14A-14B depict non-limiting schematics showing the ability of a muscle-targeting complex (DTX-C-008) comprising control DMPK-ASO to target nuclear mutant DMPK RNA in a mouse model. (N=6 mice)

[0043] FIGS. 15A-15B depict non-limiting schematics showing the ability of a muscle-targeting complex (DTX-Actin) comprising an oligonucleotide that targets actin to dose-dependently reduce expression levels of actin and functional grades of myotonia in muscle tissues. (N=2 HSA^{LR} mice)

[0044] FIGS. 16A-16C depict non-limiting schematics showing that a muscle-targeting complex (DTX-C-008) is capable of significantly reducing the prolonged QTc interval in a mouse model for validation of the functional correction of arrhythmia in a DM1 cardiac model. (N=10 mice) FIG. 16A shows a schematic of the human DMPK construct driving the mouse model of DM1, FIG. 16B shows measured QRS intervals, and FIG. 16C shows measured QTc intervals.

[0045] FIGS. 17A-17B depict non-limiting schematics showing that a muscle-targeting complex (DTX-C-012) comprising an anti-transferrin receptor antibody (a 15G11 antibody) and control DMPK-ASO antisense oligonucleotide is capable of reducing expression levels of DMPK and correcting splicing of a DMPK-specific target gene (Bin1) in human cells from a DM1 patient. (N=3).

[0046] FIG. 18 depicts a non-limiting schematic showing the ability of a muscle-targeting complex (anti-TfR-FM10) an anti-transferrin receptor antibody (a 15G11 antibody) conjugated to FM10 antisense oligonucleotide to reduce expression levels of downstream DUX4 genes (ZSCAN4, MBD3L2, TRIM43) in human U-2 OS cells, relative to naked FM10 antisense oligonucleotide.

[0047] FIG. 19 depicts a non-limiting schematic showing the ability of an anti-transferrin receptor muscle targeting complex comprising an exon-23 skipping phosphorodiamidate morpholino oligomer (PMO) to dose-dependently enhance exon skipping in muscle tissues of a mdx mouse model.

[0048] FIGS. 20A-20B depict non-limiting schematics showing the ability of an anti-transferrin receptor muscle targeting complex comprising an exon-23 skipping PMO to dose-dependently increase dystrophin in skeletal muscle of a mdx mouse model.

[0049] FIGS. 21A-21C depict non-limiting schematics showing the ability of an anti-transferrin receptor muscle targeting complex comprising an exon-23 skipping PMO to improve functional performance (FIGS. 21A-21B) and reduce creatine kinase levels (FIG. 21C) in an mdx mouse model.

[0050] FIGS. 22A-22C depict non-limiting schematics showing the dose response of selected antisense oligonucleotides in DMPK knockdown in human DM1 myotubes. control DMPK-ASO was used as control. All tested oligonucleotides showed activity in DMPK knockdown. Statistical analysis: One-way ANOVA with Tukey’s HSD post-hoc test vs. control DMPK-ASO treatment; *p<0.05, **p<0.01, ***p<0.001, ****p<0.0001.

[0051] FIGS. 23A-23B depict non-limiting schematics showing the dose response of selected antisense oligonucleotides in DMPK knockdown in non-human primate (NHP) DM1 myotubes. Control DMPK-ASO was used as control. All tested oligonucleotides showed activity in DMPK knockdown.

[0052] FIG. 24 is a graph showing DMPK knock down efficiency in non-human primate (NHP) cells or cells from human DM1 patients (DM1) of conjugates containing selected anti-TfRl antibodies covalently conjugated to an antisense oligonucleotide targeting DMPK.

[0053] FIGS. 25A-25B show binding of the different anti-TfRl antibody formats to human (FIG. 25A) or cyno (FIG. 25B) transferrin receptor 1.

[0054] FIG. 26 shows binding of the different anti-TfRl antibody formats to human transferrin receptor 2. An anti-TfR2 monoclonal antibody (OTI1B1) was used as control. None of the tested antibodies binds to TfR2.

[0055] FIG. 27 is a graph showing DMPK knock down efficiency in non-human primate (NHP) cells or cells from human DM1 patients (DM1) of conjugates containing an anti-TfRl antibody described herein covalently conjugated to an antisense oligonucleotide targeting DMPK.

[0056] FIGS. 28A-28B show binding of oligonucleotide-conjugated or unconjugated anti-TfR to human TfRl (hTfR1) and cynomolgus monkey TfRl (cTfR1), as measured by ELISA. The anti-TfR is the one in Table 7. FIG. 28A shows the binding of the anti-TfR alone (EC50 26.6 nM) or in conjugates with a DMPK targeting oligo (EC50 8.2 nM) to hTfR1. FIG. 28B shows the binding of the anti-TfR alone (EC50 33.6 nM) or in conjugates with a DMPK targeting oligo (EC50 5.3 nM) to cTfR1.

[0057] FIG. 29 shows the quantified cellular uptake of anti-TfR Fab conjugates into rhabdomyosarcoma (RD) cells. The molecular payload in the tested conjugates are DMPK-targeting oligonucleotides. The uptake of the conjugates were facilitated by indicated anti-TfR Fabs. Conjugates having a negative control Fab (anti-mouse TfR) or a positive control Fab (anti-human TfRl) are also included this assay. Cells were incubated with indicated conjugate at a concentration of 100 nM for 4 hours. Cellular uptake was measured by mean Cypher5e fluorescence. The anti-TfR is the one in Table 7.

[0058] FIG. 30 shows DMPK expression in RD cells treated with various concentrations of conjugates containing an anti-TfR antibody (the anti-TfR in Table 7) conjugated to a DMPK-targeting oligonucleotide (control DMPK-ASO). The duration of treatment was 3 days. Control DMPK-ASO delivered using transfection agents were used as control.

[0059] FIG. 31 shows the serum stability of the linker used for linking an anti-TfR antibody and a molecular payload (e.g., an oligonucleotide) in various species over time after intravenous administration.

[0060] FIG. 32 shows DMPK expression in RD cells treated with DMPK-targeting oligonucleotides relative to cells treated with PBS. The duration of treatment was 3 days. DMPK-targeting oligonucleotides were delivered to the cells as free oligonucleotides (gymnotic uptake, “free”) or with transfection reagent (“trans”).

[0061] FIG. 33 shows results of splicing correction in Atp2a1 by an anti-TfRl antibody-oligonucleotide conjugate (Ab-ASO) in the HSA-LR mouse model of DM1, measured in the gastrocnemius muscle. The anti-TfR used is RI7 217 and the oligonucleotide is targeting skeletal actin.

[0062] FIGS. 34A-34C show splicing correction in more than 30 different RNAs related to DM1, measured in the gastrocnemius muscle of HSA-LR mice treated anti-TfRl antibody-oligonucleotide (Ab-ASO) conjugate or saline. The anti-TfR used is RI7 217 and the oligonucleotide is targeting skeletal actin.

[0063] FIG. 35 shows splicing derangement in quadriceps, gastrocnemius, or tibialis anterior muscles of HSA-LR mice treated with anti-TfRl antibody-oligonucleotide conjugate (Ab-ASO) or saline. The data represent composite splicing derangement measured in the more than 30 RNAs shown in FIGS. 34A-34C.

[0064] FIG. 36 shows myotonia grade measured in quadriceps, gastrocnemius, and tibialis anterior muscles of HSA-LR mice treated with saline, unconjugated oligonucleotide (ASO), or anti-TfRl antibody-oligonucleotide conjugate (Ab-ASO). Myotonia was measured by electromyography (EMG), and graded 0, 1, 2, or 3 based on the frequency of myotonic discharge.

[0065] FIG. 37 shows skipping of exon 51 in human DMD myotubes, facilitated by a DMD exon 51 skipping oligonucleotide (a PMO). Cells were treated with the naked PMO or with PMO conjugated to an anti-TfRl Fab (Ab-PMO).

[0066] FIG. 38 shows dose-dependent increase of dystrophin expression in quadriceps muscles of mdx mice after treatment with anti-mouse TfRl (RI7 217) conjugated to an oligonucleotide (a PMO) targeted to exon 23, as measured by Western blotting for dystrophin, with alpha-actin as a loading control. The standards were generated using pooled wild-type protein and pooled mdx protein. The percent indicates the amount of WT protein spiked into the sample.

[0067] FIG. 39 shows quantification of dystrophin protein levels within quadriceps muscles of mdx mice after treatment with various doses of anti-mouse TfR (RI7 217) conjugated to an oligonucleotide (a PMO) targeting exon 23.

[0068] FIG. 40 shows immunofluorescent staining images of quadriceps muscles from wild-type (WT) mice treated with saline, or mdx mice treated with saline, naked oligonucleotide or oligonucleotide conjugated to anti- mouse TfRl (RI7 217).

[0069] FIGS. 41A-41B show expression of MBD3L2, TRIM43, and ZSCAN4 transcripts in FSHD patient-derived myotubes treated with naked FM-10 (FIG. 41A) or FM-10 conjugated to anti-TfRl (FIG. 41B) over a range of concentrations.

[0070] FIG. 42 shows data illustrating that conjugates containing an anti-TfR Fab′ (HC of SEQ ID NO: 308 and LC of SEQ ID NO: 212) conjugated to a DMD exon-skipping oligonucleotide resulted in enhanced exon skipping compared to the naked DMD exon skipping oligo in DMD patient myotubes.

[0071] FIGS. 43A-43D show in vivo activity of conjugates containing an anti-TfR Fab′ (a control anti-TfR Fab′ or an anti-TfR Fab′ having a HC of SEQ ID NO: 308 and a LC of SEQ ID NO: 212) conjugated to DMPK-targeting oligonucleotide in reducing DMPK mRNA expression in mice expressing human TfRl (hTfR1 knock-in mice). Remaining DMPK mRNA levels were measured 14 days post first dose in the tibialis anterior (FIG. 43A), gastrocnemius (FIG. 43B), heart (FIG. 43C), and diaphragm (FIG. 43D), of the mice. In FIGS. 43A-43D, p < 0.05 (*); p < 0.01 (**); p < 0.001 (***); p < 0.0001 (****).

[0072] FIGS. 44A-44C show that conjugates containing anti-TfR conjugated to DMPK-targeting oligonucleotide corrected splicing and reduced foci in CM-DM1-32F primary cells expressing a DMPK mutant mRNA containing 380 GTG repeats. FIG. 44A shows that the conjugates reduced mutant DMPK mRNA expression. FIG. 44B shows that the conjugates corrected BIN1 Exon 11 splicing. FIG. 44C shows images of a fluorescence in situ hybridization (FISH) analysis and quantification of the images, demonstrating that the conjugated reduced nuclear foci formed by the mutant DMPK mRNA.

### DETAILED DESCRIPTION

[0073] Aspects of the disclosure relate to a recognition that while certain molecular payloads (e.g., oligonucleotides, peptides, small molecules) can have beneficial effects in muscle cells, it has proven challenging to effectively target such cells. As described herein, the present disclosure provides complexes comprising muscle-targeting agents covalently linked to molecular payloads in order to overcome such challenges. In some embodiments, the complexes are particularly useful for delivering molecular payloads that modulate expression or activity of target genes in muscle cells, e.g., in a subject having or suspected of having a muscle disease. For example, in some embodiments, complexes are useful for treating subjects having rare muscle diseases, including Pompe disease, Centronuclear myopathy, Fibrodysplasia Ossificans Progressiva, Friedreich’s ataxia, or Duchenne muscular dystrophy. In some embodiments, depending on the condition to be treated, different molecular payloads may be used in such complexes. For example, if the underlying mutation gives rise to a splicing defect, then an oligonucleotide or other payload may be used to correct the splicing defect (e.g., an oligonucleotide that inhibits exon skipping or promotes alternative splicing). If the underlying mutation results in a gain-of-function allele, then an oligonucleotide (e.g., RNAi, PMO, ASO-gapmer) may be used to inhibit the expression or activity of the allele. In some embodiments, e.g., when the mutation results in a loss-of-function allele, the payload may comprise an expression construct, e.g., for expressing a wild-type version of the allele. In some embodiments, the payload may comprise machinery (e.g., a guide nucleic acid, expression construct encoding a gene editing enzyme) for correcting the underlying defect, e.g., by gene editing.

[0074] Further aspects of the disclosure, including a description of defined terms, are provided below.

### I. Definitions

[0075] Administering: As used herein, the terms “administering” or “administration” means to provide a complex to a subject in a manner that is physiologically and/or (e.g., and) pharmacologically useful (e.g., to treat a condition in the subject).

[0076] Approximately: As used herein, the term “approximately” or “about,” as applied to one or more values of interest, refers to a value that is similar to a stated reference value. In certain embodiments, the term “approximately” or “about” refers to a range of values that fall within 15%, 14%, 13%, 12%, 11%, 10%, 9%, 8%, 7%, 6%, 5%, 4%, 3%, 2%, 1%, or less in either direction (greater than or less than) of the stated reference value unless otherwise stated or otherwise evident from the context (except where such number would exceed 100% of a possible value).

[0077] Antibody: As used herein, the term “antibody” refers to a polypeptide that includes at least one immunoglobulin variable domain or at least one antigenic determinant, e.g., paratope that specifically binds to an antigen. In some embodiments, an antibody is a full-length antibody. In some embodiments, an antibody is a chimeric antibody. In some embodiments, an antibody is a humanized antibody. However, in some embodiments, an antibody is a Fab fragment, a F(ab′) fragment, a F(ab′)2 fragment, a Fv fragment or a scFv fragment. In some embodiments, an antibody is a nanobody derived from a camelid antibody or a nanobody derived from shark antibody. In some embodiments, an antibody is a diabody. In some embodiments, an antibody comprises a framework having a human germline sequence. In another embodiment, an antibody comprises a heavy chain constant domain selected from the group consisting of IgG, IgG1, IgG2, IgG2A, IgG2B, IgG2C, IgG3, IgG4, IgA1, IgA2, IgD, IgM, and IgE constant domains. In some embodiments, an antibody comprises a heavy (H) chain variable region (abbreviated herein as VH), and/or (e.g., and) a light (L) chain variable region (abbreviated herein as VL). In some embodiments, an antibody comprises a constant domain, e.g., an Fc region. An immunoglobulin constant domain refers to a heavy or light chain constant domain. Human IgG heavy chain and light chain constant domain amino acid sequences and their functional variations are known. With respect to the heavy chain, in some embodiments, the heavy chain of an antibody described herein can be an alpha (α), delta (Δ), epsilon (ε), gamma (γ) or mu (µ) heavy chain. In some embodiments, the heavy chain of an antibody described herein can comprise a human alpha (α), delta (Δ), epsilon (ε), gamma (γ) or mu (µ) heavy chain. In a particular, embodiment, an antibody described herein comprises a human gamma 1 CH1, CH2, and/or (e.g., and) CH3 domain. In some embodiments, the amino acid sequence of the VH domain comprises the amino acid sequence of a human gamma (γ) heavy chain constant region, such as any known in the art. Non-limiting examples of human constant region sequences have been described in the art, e.g., see U.S. Pat. No. 5,693,780 and Kabat E A et al., (1991) supra. In some embodiments, the VH domain comprises an amino acid sequence that is at least 70%, 75%, 80%, 85%, 90%, 95%, 98%, or at least 99% identical to any of the variable chain constant regions provided herein. In some embodiments, an antibody is modified, e.g., modified via glycosylation, phosphorylation, sumoylation, and/or (e.g., and) methylation. In some embodiments, an antibody is a glycosylated antibody, which is conjugated to one or more sugar or carbohydrate molecules. In some embodiments, the one or more sugar or carbohydrate molecule are conjugated to the antibody via N-glycosylation, O-glycosylation, C-glycosylation, glypiation (GPI anchor attachment), and/or (e.g., and) phosphoglycosylation. In some embodiments, the one or more sugar or carbohydrate molecule are monosaccharides, disaccharides, oligosaccharides, or glycans. In some embodiments, the one or more sugar or carbohydrate molecule is a branched oligosaccharide or a branched glycan. In some embodiments, the one or more sugar or carbohydrate molecule includes a mannose unit, a glucose unit, an N-acetylglucosamine unit, an N-acetylgalactosamine unit, a galactose unit, a fucose unit, or a phospholipid unit. In some embodiments, an antibody is a construct that comprises a polypeptide comprising one or more antigen binding fragments of the disclosure linked to a linker polypeptide or an immunoglobulin constant domain. Linker polypeptides comprise two or more amino acid residues joined by peptide bonds and are used to link one or more antigen binding portions. Examples of linker polypeptides have been reported (see e.g., Holliger, P., et al. (1993) Proc. Natl. Acad. Sci. USA 90:6444-6448; Poljak, R. J., et al. (1994) Structure 2:1121-1123). Still further, an antibody may be part of a larger immunoadhesion molecule, formed by covalent or noncovalent association of the antibody or antibody portion with one or more other proteins or peptides. Examples of such immunoadhesion molecules include use of the streptavidin core region to make a tetrameric scFv molecule (Kipriyanov, S. M., et al. (1995) Human Antibodies and Hybridomas 6:93-101) and use of a cysteine residue, a marker peptide and a C-terminal polyhistidine tag to make bivalent and biotinylated scFv molecules (Kipriyanov, S. M., et al. (1994) Mol. Immunol. 31:1047-1058).

[0078] CDR: As used herein, the term “CDR” refers to the complementarity determining region within antibody variable sequences. There are three CDRs in each of the variable regions of the heavy chain and the light chain, which are designated CDR1, CDR2 and CDR3, for each of the variable regions. The term “CDR set” as used herein refers to a group of three CDRs that occur in a single variable region capable of binding the antigen. The exact boundaries of these CDRs have been defined differently according to different systems. The system described by Kabat (Kabat et al., Sequences of Proteins of Immunological Interest (National Institutes of Health, Bethesda, Md. (1987) and (1991)) not only provides an unambiguous residue numbering system applicable to any variable region of an antibody, but also provides precise residue boundaries defining the three CDRs. These CDRs may be referred to as Kabat CDRs. Sub-portions of CDRs may be designated as L1, L2 and L3 or H1, H2 and H3 where the “L” and the “H” designates the light chain and the heavy chains regions, respectively. These regions may be referred to as Chothia CDRs, which have boundaries that overlap with Kabat CDRs. Other boundaries defining CDRs overlapping with the Kabat CDRs have been described by Padlan (FASEB J. 9:133-139 (1995)) and MacCallum (J Mol Biol 262(5):732-45 (1996)). Still other CDR boundary definitions may not strictly follow one of the above systems, but will nonetheless overlap with the Kabat CDRs, although they may be shortened or lengthened in light of prediction or experimental findings that particular residues or groups of residues or even entire CDRs do not significantly impact antigen binding. The methods used herein may utilize CDRs defined according to any of these systems, although preferred embodiments use Kabat or Chothia defined CDRs.

[0079] CDR-grafted antibody: The term “CDR-grafted antibody” refers to antibodies which comprise heavy and light chain variable region sequences from one species but in which the sequences of one or more of the CDR regions of VH and/or (e.g., and) VL are replaced with CDR sequences of another species, such as antibodies having murine heavy and light chain variable regions in which one or more of the murine CDRs (e.g., CDR3) has been replaced with human CDR sequences.

[0080] Chimeric antibody: The term “chimeric antibody” refers to antibodies which comprise heavy and light chain variable region sequences from one species and constant region sequences from another species, such as antibodies having murine heavy and light chain variable regions linked to human constant regions.

[0081] Complementary: As used herein, the term “complementary” refers to the capacity for precise pairing between two nucleotides or two sets of nucleotides. In particular, complementary is a term that characterizes an extent of hydrogen bond pairing that brings about binding between two nucleotides or two sets of nucleotides. For example, if a base at one position of an oligonucleotide is capable of hydrogen bonding with a base at the corresponding position of a target nucleic acid (e.g., an mRNA), then the bases are considered to be complementary to each other at that position. Base pairings may include both canonical Watson-Crick base pairing and non-Watson-Crick base pairing (e.g., Wobble base pairing and Hoogsteen base pairing). For example, in some embodiments, for complementary base pairings, adenosine-type bases (A) are complementary to thymidine-type bases (T) or uracil-type bases (U), that cytosine-type bases (C) are complementary to guanosine-type bases (G), and that universal bases such as 3-nitropyrrole or 5-nitroindole can hybridize to and are considered complementary to any A, C, U, or T. Inosine (I) has also been considered in the art to be a universal base and is considered complementary to any A, C, U or T.

[0082] Conservative amino acid substitution: As used herein, a “conservative amino acid substitution” refers to an amino acid substitution that does not alter the relative charge or size characteristics of the protein in which the amino acid substitution is made. Variants can be prepared according to methods for altering polypeptide sequence known to one of ordinary skill in the art such as are found in references which compile such methods, e.g. Molecular Cloning: A Laboratory Manual, J. Sambrook, et al., eds., Fourth Edition, Cold Spring Harbor Laboratory Press, Cold Spring Harbor, New York, 2012, or Current Protocols in Molecular Biology, F.M. Ausubel, et al., eds., John Wiley & Sons, Inc., New York. Conservative substitutions of amino acids include substitutions made amongst amino acids within the following groups: (a) M, I, L, V; (b) F, Y, W; (c) K, R, H; (d) A, G; (e) S, T; (f) Q, N; and (g) E, D.

[0083] Covalently linked: As used herein, the term “covalently linked” refers to a characteristic of two or more molecules being linked together via at least one covalent bond. In some embodiments, two molecules can be covalently linked together by a single bond, e.g., a disulfide bond or disulfide bridge, that serves as a linker between the molecules. However, in some embodiments, two or more molecules can be covalently linked together via a molecule that serves as a linker that joins the two or more molecules together through multiple covalent bonds. In some embodiments, a linker may be a cleavable linker. However, in some embodiments, a linker may be a non-cleavable linker.

[0084] Cross-reactive: As used herein and in the context of a targeting agent (e.g., antibody), the term “cross-reactive,” refers to a property of the agent being capable of specifically binding to more than one antigen of a similar type or class (e.g., antigens of multiple homologs, paralogs, or orthologs) with similar affinity or avidity. For example, in some embodiments, an antibody that is cross-reactive against human and non-human primate antigens of a similar type or class (e.g., a human transferrin receptor and non-human primate transferrin receptor) is capable of binding to the human antigen and non-human primate antigens with a similar affinity or avidity. In some embodiments, an antibody is cross-reactive against a human antigen and a rodent antigen of a similar type or class. In some embodiments, an antibody is cross-reactive against a rodent antigen and a non-human primate antigen of a similar type or class. In some embodiments, an antibody is cross-reactive against a human antigen, a non-human primate antigen, and a rodent antigen of a similar type or class.

[0085] Disease allele: As used herein, the term “disease allele” refers to any one of alternative forms (e.g., mutant forms) of a gene for which the allele is correlated with and/or (e.g., and) directly or indirectly contributes to, or causes, disease. A disease allele may comprise gene alterations including, but not limited to, insertions (e.g., disease-associated repeats described below), deletions, missense mutations, nonsense mutations and splice-site mutations relative to a wild-type (non-disease) allele. In some embodiments, a disease allele has a loss-of-function mutation. In some embodiments, a disease allele has a gain-of-function mutation. In some embodiments, a disease allele encodes an activating mutation (e.g., encodes a protein that is constitutively active). In some embodiments, a disease allele is a recessive allele having a recessive phenotype. In some embodiments, a disease allele is a dominant allele having a dominant phenotype.

[0086] Disease-associated-repeat: As used herein, the term “disease-associated-repeat” refers to a repeated nucleotide sequence at a genomic location for which the number of units of the repeated nucleotide sequence is correlated with and/or (e.g., and) directly or indirectly contributes to, or causes, genetic disease. Each repeating unit of a disease associated repeat may be 2, 3, 4, 5 or more nucleotides in length. For example, in some embodiments, a disease associated repeat is a dinucleotide repeat. In some embodiments, a disease associated repeat is a trinucleotide repeat. In some embodiments, a disease associated repeat is a tetranucleotide repeat. In some embodiments, a disease associated repeat is a pentanucleotide repeat. In some embodiments, embodiments, the disease-associated-repeat comprises CAG repeats, CTG repeats, CUG repeats, CGG repeats, CCTG repeats, or a nucleotide complement of any thereof. In some embodiments, a disease-associated-repeat is in a non-coding portion of a gene. However, in some embodiments, a disease-associated-repeat is in a coding region of a gene. In some embodiments, a disease-associated-repeat is expanded from a normal state to a length that directly or indirectly contributes to, or causes, genetic disease. In some embodiments, a disease-associated-repeat is in RNA (e.g., an RNA transcript). In some embodiments, a disease-associated-repeat is in DNA (e.g., a chromosome, a plasmid). In some embodiments, a disease-associated-repeat is expanded in a chromosome of a germline cell. In some embodiments, a disease-associated-repeat is expanded in a chromosome of a somatic cell. In some embodiments, a disease-associated-repeat is expanded to a number of repeating units that is associated with congenital onset of disease. In some embodiments, a disease-associated-repeat is expanded to a number of repeating units that is associated with childhood onset of disease. In some embodiments, a disease-associated-repeat is expanded to a number of repeating units that is associated with adult onset of disease.

[0087] Framework: As used herein, the term “framework” or “framework sequence” refers to the remaining sequences of a variable region minus the CDRs. Because the exact definition of a CDR sequence can be determined by different systems, the meaning of a framework sequence is subject to correspondingly different interpretations. The six CDRs (CDR-L1, CDR-L2, and CDR-L3 of light chain and CDR-H1, CDR-H2, and CDR-H3 of heavy chain) also divide the framework regions on the light chain and the heavy chain into four sub-regions (FR1, FR2, FR3 and FR4) on each chain, in which CDR1 is positioned between FR1 and FR2, CDR2 between FR2 and FR3, and CDR3 between FR3 and FR4. Without specifying the particular sub-regions as FR1, FR2, FR3 or FR4, a framework region, as referred by others, represents the combined FRs within the variable region of a single, naturally occurring immunoglobulin chain. As used herein, a FR represents one of the four sub-regions, and FRs represents two or more of the four sub-regions constituting a framework region. Human heavy chain and light chain acceptor sequences are known in the art. In one embodiment, the acceptor sequences known in the art may be used in the antibodies disclosed herein.

[0088] Human antibody: The term “human antibody”, as used herein, is intended to include antibodies having variable and constant regions derived from human germline immunoglobulin sequences. The human antibodies of the disclosure may include amino acid residues not encoded by human germline immunoglobulin sequences (e.g., mutations introduced by random or site-specific mutagenesis in vitro or by somatic mutation in vivo), for example in the CDRs and in particular CDR3. However, the term “human antibody”, as used herein, is not intended to include antibodies in which CDR sequences derived from the germline of another mammalian species, such as a mouse, have been grafted onto human framework sequences.

[0089] Humanized antibody: The term “humanized antibody” refers to antibodies which comprise heavy and light chain variable region sequences from a non-human species (e.g., a mouse) but in which at least a portion of the VH and/or (e.g., and) VL sequence has been altered to be more “human-like”, i.e., more similar to human germline variable sequences. One type of humanized antibody is a CDR-grafted antibody, in which human CDR sequences are introduced into non-human VH and VL sequences to replace the corresponding nonhuman CDR sequences. In one embodiment, humanized anti-transferrin receptor antibodies and antigen binding portions are provided. Such antibodies may be generated by obtaining murine anti-transferrin receptor monoclonal antibodies using traditional hybridoma technology followed by humanization using in vitro genetic engineering, such as those disclosed in Kasaian et al PCT publication No. WO 2005/123126 A2 .

[0090] Internalizing cell surface receptor: As used herein, the term, “internalizing cell surface receptor” refers to a cell surface receptor that is internalized by cells, e.g., upon external stimulation, e.g., ligand binding to the receptor. In some embodiments, an internalizing cell surface receptor is internalized by endocytosis. In some embodiments, an internalizing cell surface receptor is internalized by clathrin-mediated endocytosis. However, in some embodiments, an internalizing cell surface receptor is internalized by a clathrin-independent pathway, such as, for example, phagocytosis, macropinocytosis, caveolae- and raft-mediated uptake or constitutive clathrin-independent endocytosis. In some embodiments, the internalizing cell surface receptor comprises an intracellular domain, a transmembrane domain, and/or (e.g., and) an extracellular domain, which may optionally further comprise a ligand-binding domain. In some embodiments, a cell surface receptor becomes internalized by a cell after ligand binding. In some embodiments, a ligand may be a muscle-targeting agent or a muscle-targeting antibody. In some embodiments, an internalizing cell surface receptor is a transferrin receptor.

[0091] Isolated antibody: An “isolated antibody”, as used herein, is intended to refer to an antibody that is substantially free of other antibodies having different antigenic specificities (e.g., an isolated antibody that specifically binds transferrin receptor is substantially free of antibodies that specifically bind antigens other than transferrin receptor). An isolated antibody that specifically binds transferrin receptor complex may, however, have cross-reactivity to other antigens, such as transferrin receptor molecules from other species. Moreover, an isolated antibody may be substantially free of other cellular material and/or (e.g., and) chemicals.

[0092] Kabat numbering: The terms “Kabat numbering”, “Kabat definitions and “Kabat labeling” are used interchangeably herein. These terms, which are recognized in the art, refer to a system of numbering amino acid residues which are more variable (i.e. hypervariable) than other amino acid residues in the heavy and light chain variable regions of an antibody, or an antigen binding portion thereof (Kabat et al. (1971) Ann. NY Acad, Sci. 190:382-391 and, Kabat, E. A., et al. (1991) Sequences of Proteins of Immunological Interest, Fifth Edition, U.S. Department of Health and Human Services, NIH Publication No. 91-3242). For the heavy chain variable region, the hypervariable region ranges from amino acid positions 31 to 35 for CDR1, amino acid positions 50 to 65 for CDR2, and amino acid positions 95 to 102 for CDR3. For the light chain variable region, the hypervariable region ranges from amino acid positions 24 to 34 for CDR1, amino acid positions 50 to 56 for CDR2, and amino acid positions 89 to 97 for CDR3.

[0093] Molecular payload: As used herein, the term “molecular payload” refers to a molecule or species that functions to modulate a biological outcome. In some embodiments, a molecular payload is linked to, or otherwise associated with a muscle-targeting agent. In some embodiments, the molecular payload is a small molecule, a protein, a peptide, a nucleic acid, or an oligonucleotide. In some embodiments, the molecular payload functions to modulate the transcription of a DNA sequence, to modulate the expression of a protein, or to modulate the activity of a protein. In some embodiments, the molecular payload is an oligonucleotide that comprises a strand having a region of complementarity to a target gene.

[0094] Muscle Disease Gene: As used herein, the term “muscle disease gene” refers to a gene having a least one disease allele correlated with and/or (e.g., and) directly or indirectly contributing to, or causing, a muscle disease. In some embodiments, the muscle disease is a rare disease, e.g., as defined by the Genetic and Rare Diseases Information Center (GARD), which is a program of the National Center for Advancing Translational Sciences (NCATS). In some embodiments, the muscle disease is a rare disease that is characterized as affecting fewer than 200,000 people. In some embodiments, the muscle disease is a single-gene disease. In some embodiments, a muscle disease gene is a gene listed in Table 1.

[0095] Muscle-targeting agent: As used herein, the term, “muscle-targeting agent,” refers to a molecule that specifically binds to an antigen expressed on muscle cells. The antigen in or on muscle cells may be a membrane protein, for example an integral membrane protein or a peripheral membrane protein. Typically, a muscle-targeting agent specifically binds to an antigen on muscle cells that facilitates internalization of the muscle-targeting agent (and any associated molecular payload) into the muscle cells. In some embodiments, a muscle-targeting agent specifically binds to an internalizing, cell surface receptor on muscles and is capable of being internalized into muscle cells through receptor mediated internalization. In some embodiments, the muscle-targeting agent is a small molecule, a protein, a peptide, a nucleic acid (e.g., an aptamer), or an antibody. In some embodiments, the muscle-targeting agent is linked to a molecular payload.

[0096] Muscle-targeting antibody: As used herein, the term, “muscle-targeting antibody,” refers to a muscle-targeting agent that is an antibody that specifically binds to an antigen found in or on muscle cells. In some embodiments, a muscle-targeting antibody specifically binds to an antigen on muscle cells that facilitates internalization of the muscle-targeting antibody (and any associated molecular payment) into the muscle cells. In some embodiments, the muscle-targeting antibody specifically binds to an internalizing, cell surface receptor present on muscle cells. In some embodiments, the muscle-targeting antibody is an antibody that specifically binds to a transferrin receptor.

[0097] Oligonucleotide: As used herein, the term “oligonucleotide” refers to an oligomeric nucleic acid compound of up to 200 nucleotides in length. Examples of oligonucleotides include, but are not limited to, RNAi oligonucleotides (e.g., siRNAs, shRNAs), microRNAs, gapmers, mixmers, phosphorodiamidite morpholinos, peptide nucleic acids, aptamers, guide nucleic acids (e.g., Cas9 guide RNAs), etc. Oligonucleotides may be single-stranded or double-stranded. In some embodiments, an oligonucleotide may comprise one or more modified nucleotides (e.g. 2′-O-methyl sugar modifications, purine or pyrimidine modifications). In some embodiments, an oligonucleotide may comprise one or more modified internucleotide linkage. In some embodiments, an oligonucleotide may comprise one or more phosphorothioate linkages, which may be in the Rp or Sp stereochemical conformation.

[0098] Recombinant antibody: The term “recombinant human antibody”, as used herein, is intended to include all human antibodies that are prepared, expressed, created or isolated by recombinant means, such as antibodies expressed using a recombinant expression vector transfected into a host cell (described in more details in this disclosure), antibodies isolated from a recombinant, combinatorial human antibody library (Hoogenboom H. R., (1997) TIB Tech. 15:62-70; Azzazy H., and Highsmith W. E., (2002) Clin. Biochem. 35:425-445; Gavilondo J. V., and Larrick J. W. (2002) BioTechniques 29:128-145; Hoogenboom H., and Chames P. (2000) Immunology Today 21:371-378), antibodies isolated from an animal (e.g., a mouse) that is transgenic for human immunoglobulin genes (see e.g., Taylor, L. D., et al. (1992) Nucl. Acids Res. 20:6287-6295; Kellermann S-A., and Green L. L. (2002) Current Opinion in Biotechnology 13:593-597; Little M. et al (2000) Immunology Today 21:364-370) or antibodies prepared, expressed, created or isolated by any other means that involves splicing of human immunoglobulin gene sequences to other DNA sequences. Such recombinant human antibodies have variable and constant regions derived from human germline immunoglobulin sequences. In certain embodiments, however, such recombinant human antibodies are subjected to in vitro mutagenesis (or, when an animal transgenic for human Ig sequences is used, in vivo somatic mutagenesis) and thus the amino acid sequences of the VH and VL regions of the recombinant antibodies are sequences that, while derived from and related to human germline VH and VL sequences, may not naturally exist within the human antibody germline repertoire in vivo. One embodiment of the disclosure provides fully human antibodies capable of binding human transferrin receptor which can be generated using techniques well known in the art, such as, but not limited to, using human Ig phage libraries such as those disclosed in Jermutus et al., PCT publication No. WO 2005/007699 A2.

[0099] Region of complementarity: As used herein, the term “region of complementarity” refers to a nucleotide sequence, e.g., of a oligonucleotide, that is sufficiently complementary to a cognate nucleotide sequence, e.g., of a target nucleic acid, such that the two nucleotide sequences are capable of annealing to one another under physiological conditions (e.g., in a cell). In some embodiments, a region of complementarity is fully complementary to a cognate nucleotide sequence of target nucleic acid. However, in some embodiments, a region of complementarity is partially complementary to a cognate nucleotide sequence of target nucleic acid (e.g., at least 80%, 90%, 95% or 99% complementarity). In some embodiments, a region of complementarity contains 1, 2, 3, or 4 mismatches compared with a cognate nucleotide sequence of a target nucleic acid.

[0100] Specifically binds: As used herein, the term “specifically binds” refers to the ability of a molecule to bind to a binding partner with a degree of affinity or avidity that enables the molecule to be used to distinguish the binding partner from an appropriate control in a binding assay or other binding context. With respect to an antibody, the term, “specifically binds”, refers to the ability of the antibody to bind to a specific antigen with a degree of affinity or avidity, compared with an appropriate reference antigen or antigens, that enables the antibody to be used to distinguish the specific antigen from others, e.g., to an extent that permits preferential targeting to certain cells, e.g., muscle cells, through binding to the antigen, as described herein. In some embodiments, an antibody specifically binds to a target if the antibody has a K_{D} for binding the target of at least about 10⁻⁴ M, 10⁻⁵ M, 10⁻⁶ M, 10⁻⁷ M, 10⁻⁸ M, 10⁻⁹ M, 10⁻¹⁰ M, 10⁻¹¹ M, 10⁻¹² M, 10⁻¹³ M, or less. In some embodiments, an antibody specifically binds to the transferrin receptor, e.g., an epitope of the apical domain of transferrin receptor.

[0101] Subject: As used herein, the term “subject” refers to a mammal. In some embodiments, a subject is non-human primate, or rodent. In some embodiments, a subject is a human. In some embodiments, a subject is a patient, e.g., a human patient that has or is suspected of having a disease. In some embodiments, the subject is a human patient who has or is suspected of having a muscle disease (e.g., any of the diseases provided in Table 1).

[0102] Transferrin receptor: As used herein, the term, “transferrin receptor” (also known as TFRC, CD71, p90, TFR, or TFR1) refers to an internalizing cell surface receptor that binds transferrin to facilitate iron uptake by endocytosis. In some embodiments, a transferrin receptor may be of human (NCBI Gene ID 7037), non-human primate (e.g., NCBI Gene ID 711568 or NCBI Gene ID 102136007), or rodent (e.g., NCBI Gene ID 22042) origin. In addition, multiple human transcript variants have been characterized that encoded different isoforms of the receptor (e.g., as annotated under GenBank RefSeq Accession Numbers: NP_001121620.1, NP_003225.2, NP_001300894.1, and NP_001300895.1).

[0103] 2′-modified nucleoside: As used herein, the terms “2′-modified nucleoside” and “2′-modified ribonucleoside” are used interchangeably and refer to a nucleoside having a sugar moiety modified at the 2′ position. In some embodiments, the 2′-modified nucleoside is a 2′-4′ bicyclic nucleoside, where the 2′ and 4′ positions of the sugar are bridged (e.g., via a methylene, an ethylene, or a (S)-constrained ethyl bridge). In some embodiments, the 2′-modified nucleoside is a non-bicyclic 2′-modified nucleoside, e.g., where the 2′ position of the sugar moiety is substituted. Non-limiting examples of 2′-modified nucleosides include: 2′-deoxy, 2′-fluoro (2′-F), 2′-O-methyl (2′-O-Me), 2′-O-methoxyethyl (2′-MOE), 2′-O-aminopropyl (2′-O-AP), 2′-O-dimethylaminoethyl (2′-O-DMAOE), 2′-O-dimethylaminopropyl (2′-O-DMAP), 2′-O-dimethylaminoethyloxyethyl (2′-O-DMAEOE), 2′-O-N-methylacetamido (2′-O-NMA), locked nucleic acid (LNA, methylene-bridged nucleic acid), ethylene-bridged nucleic acid (ENA), and (S)-constrained ethyl-bridged nucleic acid (cEt). In some embodiments, the 2′-modified nucleosides described herein are high-affinity modified nucleotides and oligonucleotides comprising the 2′-modified nucleotides have increased affinity to a target sequences, relative to an unmodified oligonucleotide. Examples of structures of 2′-modified nucleosides are provided below:

[chemical structure]

[chemical structure]

[chemical structure]

[chemical structure]

[chemical structure]

[chemical structure]

### II. Complexes

[0104] Provided herein are complexes that comprise a targeting agent, e.g. an antibody, covalently linked to a molecular payload. In some embodiments, a complex comprises a muscle-targeting antibody covalently linked to an oligonucleotide. A complex may comprise an antibody that specifically binds a single antigenic site or that binds to at least two antigenic sites that may exist on the same or different antigens. A complex may be used to modulate the activity or function of at least one gene, protein, and/or (e.g., and) nucleic acid. In some embodiments, the molecular payload present with a complex is responsible for the modulation of a gene, protein, and/or (e.g., and) nucleic acids. A molecular payload may be a small molecule, protein, nucleic acid, oligonucleotide, or any molecular entity capable of modulating the activity or function of a gene, protein, and/or (e.g., and) nucleic acid in a cell. In some embodiments, a molecular payload is an oligonucleotide that targets a muscle disease allele in muscle cells.

[0105] In some embodiments, a complex comprises a muscle-targeting agent, e.g. an anti-transferrin receptor antibody, covalently linked to a molecular payload, e.g. an antisense oligonucleotide that targets a muscle disease allele.

[0106] In some embodiments, a complex is useful for treating a muscle disease, in which a molecular payload affects the activity of the corresponding gene provided in Table 1. For example, depending on the condition, a molecular payload may modulate (e.g., decrease, increase) transcription or expression of the gene, modulate the expression of a protein encoded by the gene, or to modulate the activity of the encoded protein. In some embodiments, the molecular payload is an oligonucleotide that comprises a strand having a region of complementarity to a target gene provided in Table 1.

TABLE 1

List of muscle diseases and corresponding genes

| | | |
|---|---|---|
| Disease | Gene Symbol | GenBank Accession No. |
| Adult Pompe | GAA | NM_000152; NM_001079803; NM_001079804 |
| Adult Pompe | GYS1 | NM_001161587; NM_002103 |
| Centronuclear myopathy (CNM) | DNM2 | NM_001190716; NM_004945; NM_001005362; NM_001005360; NM_001005361; NM_007871 |
| Duchenne muscular dystrophy | DMD | NM_004023; NM_004020; NM_004018; NM_004012 |
| Facioscapulohumeral muscular dystrophy (FSHD) | DUX4 | NM_001306068; NM_001363820; NM_001205218; NM_001293798 |
| Familial hypertrophic cardiomyopathy | MYBPC3 | NM_000256 |
| Familial hypertrophic cardiomyopathy | MYH6 | NM_002471; NM_001164171; NM_010856 |
| Familial hypertrophic cardiomyopathy | MYH7 | NM_000257; NM_080728 |
| Familial hypertrophic cardiomyopathy | TNNI3 | NM_000363 |
| Familial hypertrophic cardiomyopathy | TNNT2 | NM_001001432; NM_001001431; NM_000364; NM_001001430; NM_001276347; NM_001276346; NM_001276345 |
| Fibrodysplasia Ossificans Progressiva (FOP) | ACVR1 | NM_001105; NM_001347663; NM_001347664; NM_001347665; NM_001347666; NM_001347667; NM_001111067 |
| Friedreich’s ataxia (FRDA) | FXN | NM_001161706; NM_181425; NM_000144 |
| Inclusion body myopathy 2 | GNE | NM_001190383; NM_001190384; NM_001128227; NM_005476; NM_001190388 |
| Laing distal myopathy | MYH7 | NM_000257; NM_080728 |
| Myofibrillar myopathy | BAG3 | NM_004281 |
| Myofibrillar myopathy | CRYAB | NM_001885; NM_001330379; NM_001289807; NM_001289808 |
| Myofibrillar myopathy | DES | NM_001927 |
| Myofibrillar myopathy | DNAJB6 | NM_005494; NM_058246 |
| Myofibrillar myopathy | FHL1 | NM_001159701; NM_001159699; NM_001159702; NM_001159703; NM_001159704;NM_001159700; NM_001167819; NM_001330659; NM_001449; NM_001077362 |
| Myofibrillar myopathy | FLNC | NM_001458; NM_001127487 |
| Myofibrillar myopathy | LDB3 | NM_007078; NM_001171611; NM_001171610; NM_001080114; NM_001080115; NM_001080116 |
| Myofibrillar myopathy | MYOT | NM_001300911; NM_006790; NM_001135940 |
| Myofibrillar myopathy | PLEC | NM_201378; NM_201379; NM_201380; NM_201381; NM_201382; NM_201383; NM_201384; NM_000445 |
| Myofibrillar myopathy | TTN | NM_133432; NM_133379; NM_133437; NM_003319; NM_001256850; NM_001267550; NM_133378 |
| Myotonia congenita (autosomal dominant form, Thomsen Disease) | CLCN1 | NM_000083; NM_013491 |
| Myotonic dystrophy type I | DMPK | NM_001081563; NM_004409; NM_001081560; NM_001081562; NM_001288764; NM_001288765; NM_001288766 |
| Myotonic dystrophy type II | CNBP | NM_001127192; NM_001127193; NM_001127194; NM_001127195; NM_001127196; NM_003418 |
| Myotubular myopathy | MTM1 | NM_000252 |
| Oculopharyngeal muscular dystrophy | PABPN1 | NM_004643 |
| Paramyotonia congenita | SCN4A | NM_000334 |

[0107] Further examples of muscle associated genes (the expression or activity of which genes may be targeted using a molecular payload as provided herein) include: ACTA1, ACTN1, ADAM10, ADCY5, ADGRL2, ADGRV1, ADRA1A, AKAP6, AKT1, ALDH1A3, ALPK3, AMPH, ANK3, ANKRD17, ANKS1B, APBA1, ARRB1, ASPH, ATF2, ATF3, ATP7A, ATP8A2, BBS2, BCHE, BCL9L, BDNF, BIN1, BIN3, BMP5, BMPR1A, BORCS8-MEF2B, BSN, BTBD9, CAB39, CACNA1A, CACNA1D, CACNA1E, CACNA2D3, CACNA2D4, CACNB2, CACNG7, CADM1, CADM2, CAPZB, CBLN2, CCN3, CDH11, CDH13, CDK5R1, CDKN1A, CDON, CHAT, CHD2, CHN2, CHRM1, CHRNA6, CKM, CLASP1, COL11A1, COL5A1, CRP, CTNNA2, CTNNA3, CTNND2, CYFIP1, DBN1, DGKB, DGKI, DLG1, DLG2, DLGAP1, DLL4, DMD, DMPK, DNAJC5, DNM2, DNM3, DOCK4, DSCAM, DST, DTNBP1, DTYMK, EPAS1, EPHB1, ERBB4, ERC2, EYS, EZH2, FAM107A, FGF10, FOXL2, FOXO1, FOXP1, GABBR2, GABRE, GABRG3, GAD2, GAS7, GLRA2, GNA11, GNAQ, GPC6, GPM6A, GRID2, GRIK2, GRIK3, GRM1, GRM7, GSK3A, H3-3B, HDAC2, HDAC4, HDAC9, HIF1A, HIVEP3, HLF, HOXB3, HPN, HTR3C, HTR4, IGF1, IKZF1, IRAG1, ITGA11, ITGA5, ITPR1, ITPR3, JAG1, JUP, KCNAB1, KCND3, KCNIP1, KCNIP2, KCNJ12, KCNJ5, KCNMA1, KCNMB4, KCNN1, KDM1A, KEL, LAMA2, LGMN, LHX4, LIN7C, LRFN2, LRP1, LRRC4C, LTB4R, MACO1, MAGI2, MALAT1, MAP1B, MAP1S, MAP2, MAP2K3, MAPK8, MDGA2, MESD, MMP9, MX1, MYCBP2, MYH13, MYLK, MYLK2, MYLK3, MYO1B, MYO1D, MYO5A, MYO7A, MYO7B, MYO9B, MYOM1, MYOZ3, MYRIP, NBN, NEB, NECTIN1, NF1, NLGN1, NLGN2, NOS1AP, NOS3, NOTCH1, NOTCH2, NRG1, NRG3, NRP2, NRXN2, P2RY6, PABPN1, PAK3, PALLD, PAX7, PCDH15, PCDH9, PCLO, PDE1A, PDE4D, PDGFRA, PDLIM5, PDPK1, PER1, PFKM, PHACTR1, PICALM, PIK3CA, PKP4, PLCB1, PLCB4, PLEKHM3, PMP22, PPFIA2, PRKG1, PRKN, PTEN, PTN, PTPRD, PTPRT, QKI, RAPGEF2, RHOC, RIMS2, RIMS3, RIPOR2, RIT2, RNF165, RORA, RYR2, RYR3, SCN1A, SCN2A, SDK1, SEPTIN11, SERPINE1, SHANK2, SHISA9, SHROOM1, SIX5, SLC12A7, SLC17A8, SLC18A2, SLC1A2, SLC1A4, SLC1A6, SLC22A3, SLC6A3, SLIT2, SMAD1, SMAD5, SMPD4, SNPH, SNTG2, SOD1, SORBS2, SOX6, SPTBN1, SQSTM1, STRA6, STXBP5, STXBP5L, SV2B, SVIL, SYNE1, SYNE2, SYT1, TACR1, TBX20, TCF4, TCTN1, TENM2, TENM4, TGFB3, TIAM1, TIAM2, TIGAR, TNF, TNNT3, TPM4, TRDN, TTN, UNC13A, UNC13B, UNC13C, UNC5C, UTRN, VCL, VWC2, VWC2L, WHRN, ZFHX3, and ZFPM2. The disease relevance of these genes is outlined in The DisGeNET knowledge platform for disease genomics: 2019 update, Nucleic Acids Research, 2020, Vol. 48, Database issue D845-D855, which was published online on Nov. 4, 2019, the relevant contents of which are incorporated herein by reference. DiGeNET provides a knowledge management platform integrating and standardizing data about disease associated genes and variants from multiple sources, including the scientific literature. DisGeNET covers the full spectrum of human diseases, including muscle disease, as well as normal and abnormal traits. Accordingly, complexes and molecular payloads may be configured to modulate the expression or activity of any of these genes, as described herein, e.g., to treat disease. For example, oligonucleotide payloads are provided that target RNAs (pre-mRNAs or mRNAs) encoded by these genes to modulate expression. In some embodiments, the oligonucleotides target the encoded RNAs for degradation, e.g., via RNAse H or an RNAi pathway. In other embodiments, the oligonucleotides may be configured to modulate splicing, e.g., to produce exon skipping or splice switching, as in the case of DMD and others.

### A. Muscle-Targeting Agents

[0108] Some aspects of the disclosure provide muscle-targeting agents, e.g., for delivering a molecular payload to a muscle cell. In some embodiments, such muscle-targeting agents are capable of binding to a muscle cell, e.g., via specifically binding to an antigen on the muscle cell, and delivering an associated molecular payload to the muscle cell. In some embodiments, the molecular payload is bound (e.g., covalently bound) to the muscle targeting agent and is internalized into the muscle cell upon binding of the muscle targeting agent to an antigen on the muscle cell, e.g., via endocytosis. It should be appreciated that various types of muscle-targeting agents may be used in accordance with the disclosure. For example, the muscle-targeting agent may comprise, or consist of, a nucleic acid (e.g., DNA or RNA), a peptide (e.g., an antibody), a lipid (e.g., a microvesicle), or a sugar moiety (e.g., a polysaccharide). Exemplary muscle-targeting agents are described in further detail herein, however, it should be appreciated that the exemplary muscle-targeting agents provided herein are not meant to be limiting.

[0109] Some aspects of the disclosure provide muscle-targeting agents that specifically bind to an antigen on muscle, such as skeletal muscle, smooth muscle, or cardiac muscle. In some embodiments, any of the muscle-targeting agents provided herein bind to (e.g., specifically bind to) an antigen on a skeletal muscle cell, a smooth muscle cell, and/or (e.g., and) a cardiac muscle cell.

[0110] By interacting with muscle-specific cell surface recognition elements (e.g., cell membrane proteins), both tissue localization and selective uptake into muscle cells can be achieved. In some embodiments, molecules that are substrates for muscle uptake transporters are useful for delivering a molecular payload into muscle tissue. Binding to muscle surface recognition elements followed by endocytosis can allow even large molecules such as antibodies to enter muscle cells. As another example molecular payloads conjugated to transferrin or anti-transferrin receptor antibodies can be taken up by muscle cells via binding to transferrin receptor, which may then be endocytosed, e.g., via clathrin-mediated endocytosis.

[0111] The use of muscle-targeting agents may be useful for concentrating a molecular payload (e.g., oligonucleotide) in muscle while reducing toxicity associated with effects in other tissues. In some embodiments, the muscle-targeting agent concentrates a bound molecular payload in muscle cells as compared to another cell type within a subject. In some embodiments, the muscle-targeting agent concentrates a bound molecular payload in muscle cells (e.g., skeletal, smooth, or cardiac muscle cells) in an amount that is at least 1, 2, 3, 4, 5, 6, 7, 8, 9, 10, 15, 20, 30, 40, 50, 60, 70, 80, 90, or 100 times greater than an amount in non-muscle cells (e.g., liver, neuronal, blood, or fat cells). In some embodiments, a toxicity of the molecular payload in a subject is reduced by at least 1%, 2%, 3%, 4%, 5%, 10%, 15%, 20%, 25%, 30%, 35%, 40%, 45%, 50%, 55%, 60%, 65%, 70%, 75%, 80%, 90%, or 95% when it is delivered to the subject when bound to the muscle-targeting agent.

[0112] In some embodiments, to achieve muscle selectivity, a muscle recognition element (e.g., a muscle cell antigen) may be required. As one example, a muscle-targeting agent may be a small molecule that is a substrate for a muscle-specific uptake transporter. As another example, a muscle-targeting agent may be an antibody that enters a muscle cell via transporter-mediated endocytosis. As another example, a muscle targeting agent may be a ligand that binds to cell surface receptor on a muscle cell. It should be appreciated that while transporter-based approaches provide a direct path for cellular entry, receptor-based targeting may involve stimulated endocytosis to reach the desired site of action.

[0113] Muscle cells encompassed by the present disclosure include, but are not limited to, skeletal muscle cells, smooth muscle cells, cardiac muscle cells, myoblasts and myocytes.

### i. Muscle-Targeting Antibodies

[0114] In some embodiments, the muscle-targeting agent is an antibody. Generally, the high specificity of antibodies for their target antigen provides the potential for selectively targeting muscle cells (e.g., skeletal, smooth, and/or (e.g., and) cardiac muscle cells). This specificity may also limit off-target toxicity. Examples of antibodies that are capable of targeting a surface antigen of muscle cells have been reported and are within the scope of the disclosure. For example, antibodies that target the surface of muscle cells are described in Arahata K., et al. “Immunostaining of skeletal and cardiac muscle surface membrane with antibody against Duchenne muscular dystrophy peptide” Nature 1988; 333: 861-3; Song K.S., et al. “Expression of caveolin-3 in skeletal, cardiac, and smooth muscle cells. Caveolin-3 is a component of the sarcolemma and co-fractionates with dystrophin and dystrophin-associated glycoproteins” J Biol Chem 1996; 271: 15160-5; and Weisbart R.H. et al., “Cell type specific targeted intracellular delivery into muscle of a monoclonal antibody that binds myosin IIb” Mol Immunol. 2003 Mar, 39(13):78309; the entire contents of each of which are incorporated herein by reference.

### a. Anti-Transferrin Receptor Antibodies

[0115] Some aspects of the disclosure are based on the recognition that agents binding to transferrin receptor, e.g., anti-transferrin-receptor antibodies, are capable of targeting muscle cell. Transferrin receptors are internalizing cell surface receptors that transport transferrin across the cellular membrane and participate in the regulation and homeostasis of intracellular iron levels. Some aspects of the disclosure provide transferrin receptor binding proteins, which are capable of binding to transferrin receptor. Accordingly, aspects of the disclosure provide binding proteins (e.g., antibodies) that bind to transferrin receptor. In some embodiments, binding proteins that bind to transferrin receptor are internalized, along with any bound molecular payload, into a muscle cell. As used herein, an antibody that binds to a transferrin receptor may be referred to interchangeably as an, transferrin receptor antibody, an anti-transferrin receptor antibody, or an anti-TfR antibody. Antibodies that bind, e.g. specifically bind, to a transferrin receptor may be internalized into the cell, e.g. through receptor-mediated endocytosis, upon binding to a transferrin receptor.

[0116] It should be appreciated that anti-transferrin receptor antibodies may be produced, synthesized, and/or (e.g., and) derivatized using several known methodologies, e.g. library design using phage display. Exemplary methodologies have been characterized in the art and are incorporated by reference (Díez, P. et al. “High-throughput phage-display screening in array format”, Enzyme and microbial technology, 2015, 79, 34-41.; Christoph M. H. and Stanley, J.R. “Antibody Phage Display: Technique and Applications” J Invest Dermatol. 2014, 134:2.; Engleman, Edgar (Ed.) “Human Hybridomas and Monoclonal Antibodies.” 1985, Springer.). In other embodiments, an anti-transferrin antibody has been previously characterized or disclosed. Antibodies that specifically bind to transferrin receptor are known in the art (see, e.g. US Pat. No. 4,364,934, filed Dec. 4, 1979, “Monoclonal antibody to a human early thymocyte antigen and methods for preparing same”; U.S. Pat. No. 8,409,573, filed Jun. 14, 2006, “Anti-CD71 monoclonal antibodies and uses thereof for treating malignant tumor cells”; U.S. Pat. No. 9,708,406, filed May 20, 2014, “Anti-transferrin receptor antibodies and methods of use”; US 9,611,323, filed Dec. 19, 2014, “Low affinity blood brain barrier receptor antibodies and uses therefor”; WO 2015/098989, filed Dec. 24, 2014, “Novel anti-Transferrin receptor antibody that passes through blood-brain barrier”; Schneider C. et al. “Structural features of the cell surface receptor for transferrin that is recognized by the monoclonal antibody OKT9.” J Biol Chem. 1982, 257:14, 8516-8522.; Lee et al. “Targeting Rat Anti-Mouse Transferrin Receptor Monoclonal Antibodies through Blood-Brain Barrier in Mouse” 2000, J Pharmacol. Exp. Ther., 292: 1048-1052.).

[0117] Provided herein, in some aspects, are new anti-TfR antibodies for use as the muscle targeting agents (e.g., in muscle targeting complexes). In some embodiments, the anti-TfR antibody described herein binds to transferrin receptor with high specificity and affinity. In some embodiments, the anti-TfR antibody described herein specifically binds to any extracellular epitope of a transferrin receptor or an epitope that becomes exposed to an antibody. In some embodiments, anti-TfR antibodies provided herein bind specifically to transferrin receptor from human, non-human primates, mouse, rat, etc. In some embodiments, anti-TfR antibodies provided herein bind to human transferrin receptor. In some embodiments, the anti-TfR antibody described herein binds to an amino acid segment of a human or non-human primate transferrin receptor, as provided in SEQ ID NOs: 242-245 In some embodiments, the anti-TfR antibody described herein binds to an amino acid segment corresponding to amino acids 90-96 of a human transferrin receptor as set forth in SEQ ID NO: 242, which is not in the apical domain of the transferrin receptor.

[0118] In some embodiments, an anti-TFR antibody specifically binds a TfRl (e.g., a human or non-human primate TfRl) with binding affinity (e.g., as indicated by Kd) of at least about 10⁻⁴ M, 10⁻⁵ M, 10⁻⁶ M, 10⁻⁷ M, 10⁻⁸ M, 10⁻⁹ M, 10⁻¹⁰ M, 10⁻¹¹ M, 10⁻¹² M, 10⁻¹³ M, or less. In some embodiments, the anti-TfR antibodies described herein binds to TfRl with a KD of sub-nanomolar range. In some embodiments, the anti-TfR antibodies described herein selectively binds to transferrin receptor 1 (TfRl) but do not bind to transferrin receptor 2 (TfR2). In some embodiments, the anti-TfR antibodies described herein binds to human TfRl and cyno TfRl (e.g., with a Kd of 10⁻⁷ M, 10⁻⁸ M, 10⁻⁹ M, 10⁻¹⁰ M, 10⁻¹¹ M, 10⁻¹² M, 10⁻¹³ M, or less), but does not bind to a mouse TfRl. The affinity and binding kinetics of the anti-TfR antibody can be tested using any suitable method including but not limited to biosensor technology (e.g., OCTET or BIACORE). In some embodiments, binding of any one of the anti-TfR antibody described herein does not complete with or inhibit transferrin binding to the TfRl. In some embodiments, binding of any one of the anti-TfR antibody described herein does not complete with or inhibit HFE-beta-2-microglobulin binding to the TfRl.

[0119] An example human transferrin receptor amino acid sequence, corresponding to NCBI sequence NP_003225.2 (transferrin receptor protein 1 isoform 1, homo sapiens) is as follows:

MMDQARSAFSNLFGGEPLSYTRFSLARQVDGDNSHVEMKLAVDEEENADN
NTKANVTKPKRCSGSICYGTIAVIVFFLIGFMIGYLGYCKGVEPKTECER
LAGTESPVREEPGEDFPAARRLYWDDLKRKLSEKLDSTDFTGTIKLLNEN
SYVPREAGSQKDENLALYVENQFREFKLSKVWRDQHFVKIQVKDSAQNSV
IIVDKNGRLVYLVENPGGYVAYSKAATVTGKLVHANFGTKKDFEDLYTPV
NGSIVIVRAGKITFAEKVANAESLNAIGVLIYMDQTKFPIVNAELSFFGH
AHLGTGDPYTPGFPSFNHTQFPPSRSSGLPNIPVQTISRAAAEKLFGNME
GDCPSDWKTDSTCRMVTSESKNVKLTVSNVLKEIKILNIFGVIKGFVEPD
HYVVVGAQRDAWGPGAAKSGVGTALLLKLAQMFSDMVLKDGFQPSRSIIF
ASWSAGDFGSVGATEWLEGYLSSLHLKAFTYINLDKAVLGTSNFKVSASP
LLYTLIEKTMQNVKHPVTGQFLYQDSNWASKVEKLTLDNAAFPFLAYSGI
PAVSFCFCEDTDYPYLGTTMDTYKELIERIPELNKVARAAAEVAGQFVIK
LTHDVELNLDYERYNSQLLSFVRDLNQYRADIKEMGLSLQWLYSARGDFF
RATSRLTTDFGNAEKTDRFVMKKLNDRVMRVEYHFLSPYVSPKESPFRHV
FWGSGSHTLPALLENLKLRKQNNGAFNETLFRNQLALATWTIQGAANALS
GDVWDIDNEF (SEQ ID NO: 242).

[0120] An example non-human primate transferrin receptor amino acid sequence, corresponding to NCBI sequence NP _001244232.1 (transferrin receptor protein 1, Macaca mulatta) is as follows:

MMDQARSAFSNLFGGEPLSYTRFSLARQVDGDNSHVEMKLGVDEEENTDN
NTKPNGTKPKRCGGNICYGTIAVIIFFLIGFMIGYLGYCKGVEPKTECER
LAGTESPAREEPEEDFPAAPRLYWDDLKRKLSEKLDTTDFTSTIKLLNEN
LYVPREAGSQKDENLALYIENQFREFKLSKVWRDQHFVKIQVKDSAQNSV
IIVDKNGGLVYLVENPGGYVAYSKAATVTGKLVHANFGTKKDFEDLDSPV
NGSIVIVRAGKITFAEKVANAESLNAIGVLIYMDQTKFPIVKADLSFFGH
AHLGTGDPYTPGFPSFNHTQFPPSQSSGLPNIPVQTISRAAAEKLFGNME
GDCPSDWKTDSTCKMVTSENKSVKLTVSNVLKETKILNIFGVIKGFVEPD
HYVVVGAQRDAWGPGAAKSSVGTALLLKLAQMFSDMVLKDGFQPSRSIIF
ASWSAGDFGSVGATEWLEGYLSSLHLKAFTYINLDKAVLGTSNFKVSASP
LLYTLIEKTMQDVKHPVTGRSLYQDSNWASKVEKLTLDNAAFPFLAYSGI
PAVSFCFCEDTDYPYLGTTMDTYKELVERIPELNKVARAAAEVAGQFVIK
LTHDTELNLDYERYNSQLLLFLRDLNQYRADVKEMGLSLQWLYSARGDFF
RATSRLTTDFRNAEKRDKFVMKKLNDRVMRVEYYFLSPYVSPKESPFRHV
FWGSGSHTLSALLESLKLRRQNNSAFNETLFRNQLALATWTIQGAANALS
GDVWDIDNEF (SEQ ID NO: 243)

[0121] An example non-human primate transferrin receptor amino acid sequence, corresponding to NCBI sequence XP_005545315.1 (transferrin receptor protein 1, Macaca fascicularis) is as follows:

MMDQARSAFSNLFGGEPLSYTRFSLARQVDGDNSHVEMKLGVDEEENTDN
NTKANGTKPKRCGGNICYGTIAVIIFFLIGFMIGYLGYCKGVEPKTECER
LAGTESPAREEPEEDFPAAPRLYWDDLKRKLSEKLDTTDFTSTIKLLNEN
LYVPREAGSQKDENLALYIENQFREFKLSKVWRDQHFVKIQVKDSAQNSV
IIVDKNGGLVYLVENPGGYVAYSKAATVTGKLVHANFGTKKDFEDLDSPV
NGSIVIVRAGKITFAEKVANAESLNAIGVLIYMDQTKFPIVKADLSFFGH
AHLGTGDPYTPGFPSFNHTQFPPSQSSGLPNIPVQTISRAAAEKLFGNME
GDCPSDWKTDSTCKMVTSENKSVKLTVSNVLKETKILNIFGVIKGFVEPD
HYVVVGAQRDAWGPGAAKSSVGTALLLKLAQMFSDMVLKDGFQPSRSIIF
ASWSAGDFGSVGATEWLEGYLSSLHLKAFTYINLDKAVLGTSNFKVSASP
LLYTLIEKTMQDVKHPVTGRSLYQDSNWASKVEKLTLDNAAFPFLAYSGI
PAVSFCFCEDTDYPYLGTTMDTYKELVERIPELNKVARAAAEVAGQFVIK
LTHDTELNLDYERYNSQLLLFLRDLNQYRADVKEMGLSLQWLYSARGDFF
RATSRLTTDFRNAEKRDKFVMKKLNDRVMRVEYYFLSPYVSPKESPFRHV
FWGSGSHTLSALLESLKLRRQNNSAFNETLFRNQLALATWTIQGAANALS
GDVWDIDNEF (SEQ ID NO: 244).

[0122] An example mouse transferrin receptor amino acid sequence, corresponding to NCBI sequence NP_001344227.1 (transferrin receptor protein 1, mus musculus) is as follows:

MMDQARSAFSNLFGGEPLSYTRFSLARQVDGDNSHVEMKLAADEEENADN
NMKASVRKPKRFNGRLCFAAIALVIFFLIGFMSGYLGYCKRVEQKEECVK
LAETEETDKSETMETEDVPTSSRLYWADLKTLLSEKLNSIEFADTIKQLS
QNTYTPREAGSQKDESLAYYIENQFHEFKFSKVWRDEHYVKIQVKSSIGQ
NMVTIVQSNGNLDPVESPEGYVAFSKPTEVSGKLVHANFGTKKDFEELSY
SVNGSLVIVRAGEITFAEKVANAQSFNAIGVLIYMDKNKFPVVEADLALF
GHAHLGTGDPYTPGFPSFNHTQFPPSQSSGLPNIPVQTISRAAAEKLFGK
MEGSCPARWNIDSSCKLELSQNQNVKLIVKNVLKERRILNIFGVIKGYEE
PDRYVVVGAQRDALGAGVAAKSSVGTGLLLKLAQVFSDMISKDGFRPSRS
IIFASWTAGDFGAVGATEWLEGYLSSLHLKAFTYINLDKVVLGTSNFKVS
ASPLLYTLMGKIMQDVKHPVDGKSLYRDSNWISKVEKLSFDNAAYPFLAY
SGIPAVSFCFCEDADYPYLGTRLDTYEALTQKVPQLNQMVRTAAEVAGQL
IIKLTHDVELNLDYEMYNSKLLSFMKDLNQFKTDIRDMGLSLQWLYSARG
DYFRATSRLTTDFHNAEKTNRFVMREINDRIMKVEYHFLSPYVSPRESPF
RHIFWGSGSHTLSALVENLKLRQKNITAFNETLFRNQLALATWTIQGVAN
ALSGDIWNIDNEF (SEQ ID NO: 245)

[0123] In some embodiments, an anti-transferrin receptor antibody binds to an amino acid segment of the receptor as follows:

FVKIQVKDSAQNSVIIVDKNGRLVYLVENPGGYVAYSKAATVTGKLVHAN
FGTKKDFEDLYTPVNGSIVIVRAGKITFAEKVANAESLNAIGVLIYMDQT
KFPIVNAELSFFGHAHLGTGDPYTPGFPSFNHTQFPPSRSSGLPNIPVQT
ISRAAAEKLFGNMEGDCPSDWKTDSTCRMVTSESKNVKLTVSNVLKE (S
EQ ID NO: 246)

and does not inhibit the binding interactions between transferrin receptors and transferrin and/or (e.g., and) human hemochromatosis protein (also known as HFE). In some embodiments, the anti-transferrin receptor antibody described herein does not bind an epitope in SEQ ID NO: 246.

[0124] Appropriate methodologies may be used to obtain and/or (e.g., and) produce antibodies, antibody fragments, or antigen-binding agents, e.g., through the use of recombinant DNA protocols. In some embodiments, an antibody may also be produced through the generation of hybridomas (see, e.g., Kohler, G and Milstein, C. “Continuous cultures of fused cells secreting antibody of predefined specificity” Nature, 1975, 256: 495-497). The antigen-of-interest may be used as the immunogen in any form or entity, e.g., recombinant or a naturally occurring form or entity. Hybridomas are screened using standard methods, e.g. ELISA screening, to find at least one hybridoma that produces an antibody that targets a particular antigen. Antibodies may also be produced through screening of protein expression libraries that express antibodies, e.g., phage display libraries. Phage display library design may also be used, in some embodiments, (see, e.g. U.S. Pat. No 5,223,409, filed Mar. 1, 1991, “Directed evolution of novel binding proteins”; WO 1992/18619, filed Apr. 10, 1992, “Heterodimeric receptor libraries using phagemids”; WO 1991/17271, filed May 1, 1991, “Recombinant library screening methods”; WO 1992/20791, filed May 15, 1992, “Methods for producing members of specific binding pairs”; WO 1992/15679, filed Feb. 28, 1992, and “Improved epitope displaying phage”). In some embodiments, an antigen-of-interest may be used to immunize a non-human animal, e.g., a rodent or a goat. In some embodiments, an antibody is then obtained from the non-human animal, and may be optionally modified using a number of methodologies, e.g., using recombinant DNA techniques. Additional examples of antibody production and methodologies are known in the art (see, e.g. Harlow et al. “Antibodies: A Laboratory Manual”, Cold Spring Harbor Laboratory, 1988.).

[0125] In some embodiments, an antibody is modified, e.g., modified via glycosylation, phosphorylation, sumoylation, and/or (e.g., and) methylation. In some embodiments, an antibody is a glycosylated antibody, which is conjugated to one or more sugar or carbohydrate molecules. In some embodiments, the one or more sugar or carbohydrate molecule are conjugated to the antibody via N-glycosylation, O-glycosylation, C-glycosylation, glypiation (GPI anchor attachment), and/or (e.g., and) phosphoglycosylation. In some embodiments, the one or more sugar or carbohydrate molecules are monosaccharides, disaccharides, oligosaccharides, or glycans. In some embodiments, the one or more sugar or carbohydrate molecule is a branched oligosaccharide or a branched glycan. In some embodiments, the one or more sugar or carbohydrate molecule includes a mannose unit, a glucose unit, an N-acetylglucosamine unit, an N-acetylgalactosamine unit, a galactose unit, a fucose unit, or a phospholipid unit. In some embodiments, there are about 1-10, about 1-5, about 5-10, about 1-4, about 1-3, or about 2 sugar molecules. In some embodiments, a glycosylated antibody is fully or partially glycosylated. In some embodiments, an antibody is glycosylated by chemical reactions or by enzymatic means. In some embodiments, an antibody is glycosylated in vitro or inside a cell, which may optionally be deficient in an enzyme in the N- or O- glycosylation pathway, e.g. a glycosyltransferase. In some embodiments, an antibody is functionalized with sugar or carbohydrate molecules as described in International Patent Application Publication WO2014065661, published on May 1, 2014, entitled, “Modified antibody, antibody-conjugate and process for the preparation thereof”.

[0126] In some embodiments, the anti-TfR antibody of the present disclosure comprises a VL domain and/or (e.g., and) VH domain of any one of the anti-TfR antibodies selected from Table 2, and comprises a constant region comprising the amino acid sequences of the constant regions of an IgG, IgE, IgM, IgD, IgA or IgY immunoglobulin molecule, any class (e.g., IgG1, IgG2, IgG3, IgG4, IgA1 and IgA2), or any subclass (e.g., IgG2a and IgG2b) of immunoglobulin molecule. Non-limiting examples of human constant regions are described in the art, e.g., see Kabat E A et al., (1991) supra.

[0127] The heavy chain and light chain variable domain and CDR sequences of non-limiting examples anti-TfR antibodies are provided in Table 2.

TABLE 2

Examples of anti-TfR1 antibodies (CDRs according to the IMGT® definition)

| | | |
|---|---|---|
| Ab | CDRs | Variable domains |
| 3-A4 | CDR-H1: GFNIKDDY (SEQ ID NO: 1) | VHEVQLQQSGAELVRPGASVKLSCTASGFNIKDDYMYWVKQRPEQGLEWIGWIDPENGDTEYASKFQDKATVTADTSSNTAYLQLSSLTSEDTAVYYCTLWLRRGLDYWGQGTSVTVSS (SEQ ID NO: 7) |
| | CDR-H2: IDPENGDT (SEQ ID NO: 2) | |
| | CDR-H3: TLWLRRGLDY (SEQ ID NO: 3) | |
| | CDR-L1: KSLLHSNGYTY (SEQ ID NO: 4) | VLDIVMTQAAPSVPVTPGESVSISCRSSKSLLHSNGYTYLFWFLQRPGQSPQLLIYRMSNLASGVPDRFSGSGSGTAFTLRISRVEAEDVGVYYCMQHLEYPFTFGGGTKT FTK (SEQ ID NO: 8) |
| | CDR-L2: RMS (SEQ ID NO: 5) | |
| | CDR-L3: MQHLEYPFT (SEQ ID NO: 6) | |
| 3-M12 | CDR-H1: GYSITSGYY (SEQ ID NO: 9) | VHDVQLQESGPGLVKPSQSLSLTCSVTGYSITSGYYWNWIRQFPGNKLEWMGYITFDGANNYNPSLKNRISITRDTSKNQFFLKLTSVTTEDTATYYCTRSSYDYDVLDYWGQGTTLTVSS (SEQ ID NO: 15) |
| | CDR-H2: ITFDGAN (SEQ ID NO: 10) | |
| | CDR-H3: TRSSYDYDVLDY (SEQ ID NO: 11) | |
| | CDR-L1: QDISNF (SEQ ID NO: 12) | VLDIQMTQTTSSLSASLGDRVTISCRASQDISNFLNWYQQRPDGTVKLLIYYTSRLHSGVPSRFSGSGSGTDFSLTVSNLEQEDIATYFCQQGHTLPYTFGGGTKLEIK (SEQ ID NO: 16) |
| | CDR-L2: YTS (SEQ ID NO: 13) | |
| | CDR-L3: QQGHTLPYT (SEQ ID NO: 14) | |
| 5-H12 | CDR-H1: GYSFTDYC (SEQ ID NO: 17) | VHQIQLQQSGPELVRPGASVKISCKASGYSFTDYCINWVNQRPGQGLEWIGWIYPGSGNTRYSERFKGKATLTVDTSSNTAYMQLSSLTSEDSAVYFCAREDYYPYHGMDYWGQGTSVTVSS (SEQ ID NO: 23) |
| | CDR-H2: IYPGSGNT (SEQ ID NO: 18) | |
| | CDR-H3: AREDYYPYHGMDY (SEQ ID NO: 19) | |
| | CDR-L1: ESVDGYDNSF (SEQ ID NO: 20) | VLDIVLTQSPTSLAVSLGQRATISCRASESVDGYDNSFMHWYQQKPGQPPKLLIFRASNLESGIPARFSGSGSRTDFTLTINPVEAADVATYYCQQSSEDPWTFGGGTKT FTK (SEQ ID NO: 24) |
| | CDR-L2: RAS (SEQ ID NO: 21) | |
| | CDR-L3: QQSSEDPWT (SEQ ID NO: 22) | |
| 8-K6 | CDR-H1: GYTFTSYW (SEQ ID NO: 25) | VHQVHLQQPGAELVKPGASVKMSCKASGYTFTSYWITWVKQRPGQGLEWIGDIFPNSGRTNYDEKFKSKATLTVDTSSSTAYMQLSSLTSEDSAVYFCAREGNFGSLDYWGQGTTLTVSS (SEQ ID NO: 31) |
| | CDR-H2: IFPNSGRT (SEQ ID NO: 26) | |
| | CDR-H3: AREGNFGSLDY (SEQ ID NO: 27) | |
| | CDR-L1: SNLNY (SEQ ID NO: 28) | VLQIVLTQSPAIMSASPGEKVTMTCSANSNLNYMNWYHQKSGTSPKRWIYDTSKLASGVPARFSASGSGTSYSLTISSMEAEDAATYYCQQWSRNPLTFGAGTRLELK (SEQ ID NO: 32) |
| | CDR-L2: DTS (SEQ ID NO: 29) | |
| | CDR-L3: QQWSRNPLT (SEQ ID NO: 30) | |
| 9-K23 | CDR-H1: GFSLNTYDVG (SEQ ID NO: 33) | VHQVTLKESGPGMLQPSQTLSLTCSFSGFSLNTYDVGVGWIRQPSGKGLEWLANIWWNDDKYYNSALKSRLTISKDTSNNQVFLKISSVDTADTATYYCTLYSYDGGFAYWGQGTLVTVSA (SEQ ID NO: 39) |
| | CDR-H2: IWWNDDK (SEQ ID NO: 34) | |
| | CDR-H3: TLYSYDGGFAY (SEQ ID NO: 35) | |
| | CDR-L1: SSVSSSY (SEQ ID NO: 36) | VLQIVLTQSPAIMSASLGERVTMTCTASSSVSSSYLHWYQQKPGSSPKLWIYSTSNLASGVPARFSGSGSGTSYSLTISSMEAEDAATYYCHQYHRSPYTFGGGTKLEIK (SEQ ID NO: 40) |
| | CDR-L2: STS (SEQ ID NO: 37) | |
| | CDR-L3: HQYHRSPYT (SEQ ID NO: 38) | |
| 3-E5 | CDR-H1: GYSFTGYN (SEQ ID NO: 41) | VHEIQMKQSGAELVKPGASVKISCKASGYSFTGYNMNWVKQSHGKSLEWIGNINPYYGSTGYNQKFKGKATLTVDKSSSTAYMQLNSLTSEDSAVYYCARGDYGYDEGTWFAYWGQGTLVTVSA (SEQ ID NO: 47) |
| | CDR-H2: INPYYGST (SEQ ID NO: 42) | |
| | CDR-H3: ARGDYGYDEGTWFAY (SEQ ID NO: 43) | |
| | CDR-L1: QSLLNSRTRKNY (SEQ ID NO: 44) | VLDIVMSQSPSSLAVSAGEKVTMSCKSSQSLLNSRTRKNYLAWYQQKPEQSPKLLIYWASTRESGVPDRFTGSGSGTDFTLTISSVQAEDLAVYYCKQSYNLPFTFGSGTKT FTK (SEQ ID NO: 48) |
| | CDR-L2: WAS (SEQ ID NO: 45) | |
| | CDR-L3: KQSYNLPFT (SEQ ID NO: 46) | |
| 6-D3 | CDR-H1: GYTFTRHW (SEQ ID NO: 49) | VHQVQLQQPGAELVKPGASVKMSCKASGYTFTRHWITWVKQRPGQGLEWIGDIYPGSGRTNYNEKFKSTATLTVDTSSSTAYMQLSSLTSEDSAVYYCARDGYLYINYFDYWGQGTTLTVSS (SEQ ID NO: 54) |
| | CDR-H2: IYPGSGRT (SEQ ID NO: 50) | |
| | CDR-H3: ARDGYLYINYFDY (SEQ ID NO: 51) | |
| | CDR-L1: SSVSF (SEQ ID NO: 52) | VLENVLTQSPAIMSASPGEKVTMTCSASSSVSFMHWFQQKSSTSPKLWIYDTSKLASGVPGRFSGSGSGSSYSLTISSMAAEDVATYYCFQGSGYPYTFGGGTKT FTK (SEQ ID NO: 55) |
| | CDR-L2: DTS (SEQ ID NO: 29) | |
| | CDR-L3: FQGSGYPYT (SEQ ID NO: 53) | |
| 4-O12 | CDR-H1: GFNIVDDY (SEQ ID NO: 56) | VHEVQLQQSGAELVRPGASVKLSCTASGFNIVDDYMHWVKQRPEQGLEWIGWIYPENADTEYASKFQGKATITADTSSNTAYLQLSSLTSEDTAVYYCTTATGTGWFAYWGQGTLVTVSA (SEQ ID NO: 62) |
| | CDR-H2: IYPENADT (SEQ ID NO: 57) | |
| | CDR-H3: TTATGTGWFAY (SEQ ID NO: 58) | |
| | CDR-L1: QSLLDSDGKTY (SEQ ID NO: 59) | VLDVVMTQTPLTLSVTIGQPASISCKSSQSLLDSDGKTYLNWLFQRPGQSPKRLIYLVSKLDSGVPDRFTGSGSGTDFTLKISRVETEDLGVYYCWQGTHFPWTFGGGAKLEIK (SEQ ID NO: 63) |
| | CDR-L2: LVS (SEQ ID NO: 60) | |
| | CDR-L3: WQGTHFPWT (SEQ ID NO: 61) | |
| 4-C5 | CDR-H1: GYTFSNYW (SEQ ID NO: 64) | VHQVQLQQSGAELMKPGASVKISCKATGYTFSNYWIEWVKQRPGHGLEWIGEILPGSGSTNYNENFKGKATFTADTSSNTAYMQLSSLTSEDSAVYYCARRGAYGNFHYWGQGTTLTVSS (SEQ ID NO: 70) |
| | CDR-H2: ILPGSGST (SEQ ID NO: 65) | |
| | CDR-H3: ARRGAYGNFHY (SEQ ID NO: 66) | |
| | CDR-L1: SSISSSN (SEQ ID NO: 67) | VLEIVLTQSPALMAASPGEKVTITCSVSSSISSSNLHWYQQKSETSPKPWIYGTSNLASGVPVRFSGSGSGTSYSLTISSMEAEDAATYYCQQWRSYPYTFGGGTKLEIK (SEQ ID NO: 71) |
| | CDR-L2: GTS (SEQ ID NO: 68) | |
| | CDR-L3: QQWRSYPYT (SEQ ID NO: 69) | |
| 10-P5 | CDR-H1: GYTFTDYN (SEQ ID NO: 72) | VHEVQLQQFGAELVKPGASVKISCKASGYTFTDYNMAWVKESHGKSLEWIGDINPNYDTTSYNQKFKGKATLTVDKSSSTAHMELRSLTSEGTAVYYCARSGYYGSSYYWHFDVWGTGTTVTVSS (SEQ ID NO: 77) |
| | CDR-H2: INPNYDTT (SEQ ID NO: 73) | |
| | CDR-H3: ARSGYYGSSYYWHFDV (SEQ ID NO: 74) | |
| | CDR-L1: QSLLYSSNQKNY (SEQ ID NO: 75) | VLDIVMSQSPSSLAVSVGEKVTMSCKSSQSLLYSSNQKNYLAWYQQKPGQSPKLLIYWASTRESGVPDRFTGSGSGTDFTLTISSVKAEDLAVYYCQQYYNYPFTFGSGTKT FTK (SEQ ID NO: 78) |
| | CDR-L2: WAS (SEQ ID NO: 45) | |
| | CDR-L3: QQYYNYPFT (SEQ ID NO: 76) | |
| 2-H19 | CDR-H1: GFNIKDYY (SEQ ID NO: 79) | VHEVQLQQSGAELVRSGASVKLSCTASGFNIKDYYMHWVKQRPEQGLEWIGWIDPESGDTEYAPKFQGRATMTADTSSNTAYMQLSSLTSEDTAVYYCYGHDYRVDCWGQGTSVTVSS (SEQ ID NO: 85) |
| | CDR-H2: IDPESGDT (SEQ ID NO: 80) | |
| | CDR-H3: YGHDYRVDC (SEQ ID NO: 81) | |
| | CDR-L1: QSLVHSNGNTY (SEQ ID NO: 82) | VLDVVMTQTPLSLPVSLGDQASISCRSSQSLVHSNGNTYLHWYLQKPGQSPKLLIYKVSNRFSGVPDRFSGSGSGTDFTLKISRVEAEDLGVYFCSQSTHIPWTFGGGTKT FTK (SEQ ID NO: 86) |
| | CDR-L2: KVS (SEQ ID NO: 83) | |
| | CDR-L3: SQSTHIPWT (SEQ ID NO: 84) | |
| 3-F3 | CDR-H1: GYTFTDYN (SEQ ID NO: 72) | VHEVQLQQFGAELVKPGASVKISCKASGYTFTDYNMGWVKQSHGKSLEWIGDINPNYDSTSYTQKFKGKATLTVDKSSSTAYMELRSLTSEDTAVYYCARSGYYGSSYYWHFDVWGTGTTVTVSS (SEQ ID NO: 89) |
| | CDR-H2: INPNYDST (SEQ ID NO: 87) | |
| | CDR-H3: ARSGYYGSSYYWHFDV (SEQ ID NO: 74) | |
| | CDR-L1: QSLLYSSNQKNY (SEQ ID NO: 75) | VLDIVMSQSPSSLAVSVGEKVTMSCKSSQSLLYSSNQKNYLAWYQQKPGQSPKLLIYWASTRESGVPDRFTGSGSGTDFTLTISSVKAEDLAVYYCQQYYHYPFTFGSGTKT FTK (SEQ ID NO: 90) |
| | CDR-L2: WAS (SEQ ID NO: 45) | |
| | CDR-L3: QQYYHYPFT (SEQ ID NO: 88) | |
| 8-017 | CDR-H1: GFSLTNYG (SEQ ID NO: 91) | VHQVQLKESGPGLVAPSQSLSITCTVSGFSLTNYGVHWVRQPPGKGLEWLVVIWNDGSATYNSALESRLSISKDNSKSQVFLKMNSLQTDDTAMYYCARHESSNPFAYWGQGTLVTVSA (SEQ ID NO: 97) |
| | CDR-H2: IWNDGSA (SEQ ID NO: 92) | |
| | CDR-H3: ARHESSNPFAY (SEQ ID NO: 93) | |
| | CDR-L1: QSIGTS (SEQ ID NO: 94) | VLDILLTQSPAILSVSPGERVSFSCRASQSIGTSIHWYQQRTNGSPRLLIKSASESIAGIPSRFSGSGSGTDFTLSINSVESEDIADYYCQQNNRWPYTFGGGTKLEIK (SEQ ID NO: 98) |
| | CDR-L2: SAS (SEQ ID NO: 95) | |
| | CDR-L3: QQNNRWPYT (SEQ ID NO: 96) | |
| 3-M9 | CDR-H1: DFNIKDDY (SEQ ID NO: 99) | VHEVQLQQSGAELVRPGASVKLSCTASDFNIKDDYIHWVKQRPEQGLEWIGRIDPANGNTKYAPKFQDKATITADTSSNTAYLQLSSLTSEDTAVYYCALGYTYWGQGTTLTVSS (SEQ ID NO: 104) |
| | CDR-H2: IDPANGNT (SEQ ID NO: 100) | |
| | CDR-H3: ALGYTY (SEQ ID NO: 101) | |
| | CDR-L1: QSLLHSYGKTY (SEQ ID NO: 102) | VLDVVMTQTPLTLSVTIGQPASISCKSSQSLLHSYGKTYLNWLLQRPGQSPKLLIYLVSKLESGVPDRFSGSGSGTDFTLKISRVEAEDLGVYYCLQTTHFPQTFGGGTKT FTK (SEQ ID NO: 105) |
| | CDR-L2: LVS (SEQ ID NO: 60) | |
| | CDR-L3: LQTTHFPQT (SEQ ID NO: 103) | |
| 10-H2 | CDR-H1: GFTFSDYG (SEQ ID NO: 106) | VHEVQLVESGGDLVKPGGSLKLSCAASGFTFSDYGMHWVRQGPEKGLEWVAYINSGSSTIYYADTVKGRFTISRDNAKNTLFLQMTSLRSEDTAMYYCARPGDYDNYAMDYWGQGTSVTVSS (SEQ ID NO: 112) |
| | CDR-H2: INSGSSTI (SEQ ID NO: 107) | |
| | CDR-H3: ARPGDYDNYAMDY (SEQ ID NO: 108) | |
| | CDR-L1: QDVSVA (SEQ ID NO: 109) | VLDIVMTQSHKFLSTSVGDRVSITCKASQDVSVAVAWYQQKPGQSPKLLIYWAYTRHTGVPDRFTGSGSGTEYTLTISSVQAEDLALYYCQQHYNTPPWTFGGGTKLEIK (SEQ ID NO: 113) |
| | CDR-L2: WAY (SEQ ID NO: 110) | |
| | CDR-L3: QQHYNTPPWT (SEQ ID NO: 111) | |
| 4-J22 | CDR-H1: GFNIKDYY (SEQ ID NO: 79) | VHEVQLQQSGAELVRSGASVKLSCTASGFNIKDYYIHWVKQRPEQGLEWIGWIDPENADTEYAPKFQGKATMTPDTSSNTAYLQLSSLTSEDTAVYYCYAWDYSMDYWGQGTSVTVSS (SEQ ID NO: 117) |
| | CDR-H2: IDPENADT (SEQ ID NO: 114) | |
| | CDR-H3: YAWDYSMDY (SEQ ID NO: 115) | |
| | CDR-L1: QSLVHSNGNTY (SEQ ID NO: 82) | VLDVVMTQTPLSLSVSLGDQASISCRSSQSLVHSNGNTYLHWYLQKPGQSPKLLIYKVSNRFSGVPDRFSGSGSGTDFILKISRVEAEDLGVYFCSQNTHVPYTFGGGTRLEIK (SEQ ID NO: 118) |
| | CDR-L2: KVS (SEQ ID NO: 83) | |
| | CDR-L3: SQNTHVPYT (SEQ ID NO: 116) | |
| 9-D4 | CDR-H1: GFTFTDYG (SEQ ID NO: 119) | VHQVQLQQSGTELARPGASVKLSCKASGFTFTDYGINWVKQRTGQGLEWIGEIYPSSGNSYYNEKFKAKATLTADKSSSTAYMELRSLTSEDSAVYFCARSTYYGSPIDYWGQGTTLTVSS (SEQ ID NO: 124) |
| | CDR-H2: IYPSSGNS (SEQ ID NO: 120) | |
| | CDR-H3: ARSTYYGSPIDY (SEQ ID NO: 121) | |
| | CDR-L1: QDVDTT (SEQ ID NO: 122) | VLDIVMTQSHKFMSTPVGDRVSITCKASQDVDTTVAWYQQKPGQSPKLLIYWASTRQIGVPDRFTGSGSGTDFTLTISNVQSEDLADYFCQQYSTYPLTFGGGTKLEIK (SEQ ID NO: 125) |
| | CDR-L2: WAS (SEQ ID NO: 45) | |
| | CDR-L3: QQYSTYPLT (SEQ ID NO: 123) | |
| 8-D15 | CDR-H1: GFSLTSYA (SEQ ID NO: 126) | VHQVQLKESGPGLVAPSQSLSITCTVSGFSLTSYAITWVRQSPGKGLEWLGLIWTGGGTNYNSALKSRLSISKDNSKSQVFLKMNSLQTDDTARYYCARIYDGYYRYFDVWGTGTTVTVSS (SEQ ID NO: 132) |
| | CDR-H2: IWTGGGT (SEQ ID NO: 127) | |
| | CDR-H3: ARIYDGYYRYFDV (SEQ ID NO: 128) | |
| | CDR-L1: QSVSND (SEQ ID NO: 129) | VLRIVLTQTPKFLLVSAGDRVTMTCKASQSVSNDVAWYQQKPGQSPKLLIYYASNRYTGVPDRFTGSGYGTDFTFTISTVQAEDLAVYFCQQDYSSPWTFGGGTKLEIK (SEQ ID NO: 133) |
| | CDR-L2: YAS (SEQ ID NO: 130) | |
| | CDR-L3: QQDYSSPWT (SEQ ID NO: 131) | |
| 4-H4 | CDR-H1: GFNIKDYY (SEQ ID NO: 79) | VHEVQLQQSGAELVRSGASVKLSCTASGFNIKDYYMHWVKQRPEQGLDWIGWIDPENGDTEYAPKFQGKATMTADTSSNTAYLQLSSLTSEDTAVYYCNVLTMPTAYWGQGTLVTVSA (SEQ ID NO: 136) |
| | CDR-H2: IDPENGDT (SEQ ID NO: 2) | |
| | CDR-H3: NVLTMPTAY (SEQ ID NO: 134) | |
| | CDR-L1: QSLLYSSNQKNY (SEQ ID NO: 75) | VLDIVMSQSPSSLAVSVGEKVIMSCKSSQSLLYSSNQKNYLAWYQQKPGQSPKLLIYWASTRESGVPDRFTGSGSGTDFTLTISSVKAEDLAVYYCQQYYSYPYTFGGGTKLEIK (SEQ ID NO: 137) |
| | CDR-L2: WAS (SEQ ID NO: 45) | |
| | CDR-L3: QQYYSYPYT (SEQ ID NO: 135) | |
| 9-C4 | CDR-H1: GFTFSSYG (SEQ ID NO: 138) | VHEVQLMESGGDLVKPGGSLKLSCAASGFTFSSYGLSWVRQTPDKRLEWVATITSGGSYTYYPDSVKGRFTISRDNARNTLYLQMFSLKSEDTAMYYCALWSLDYWGQGTTLTVSS (SEQ ID NO: 143) |
| | CDR-H2: ITSGGSYT (SEQ ID NO: 139) | |
| | CDR-H3: ALWSLDY (SEQ ID NO: 140) | |
| | CDR-L1: SSLSY (SEQ ID NO: 141) | VLQIVLTQSPAIMSASPGEKVTMTCSANSSLSYMHWYQQKPGTSPKRWIYDTSELASGVPARFSGSGSGTSYSLTISSMEAEDAATYYCHQRRSYPWTFGGGTKT FTK (SEQ ID NO: 144) |
| | CDR-L2: DTS (SEQ ID NO: 29) | |
| | CDR-L3: HQRRSYPWT (SEQ ID NO: 142) | |

[0128] In some embodiments, the anti-TfR antibodies of the present disclosure comprises one or more of the CDR-H (e.g., CDR-H1, CDR-H2, and CDR-H3) amino acid sequences from any one of the anti-TfR antibodies selected from Table 2. In some embodiments, the anti-TfR antibodies of the present disclosure comprise the CDR-H1, CDR-H2, and CDR-H3 as provided for any one of the antibodies elected from Table 2. In some embodiments, the anti-TfR antibodies of the present disclosure comprises one or more of the CDR-L (e.g., CDR-L1, CDR-L2, and CDR-L3) amino acid sequences from any one of the anti-TfR antibodies selected from Table 2. In some embodiments, the anti-TfR antibodies of the present disclosure comprise the CDR-L1, CDR-L2, and CDR-L3 as provided for any one of the anti-TfR antibodies selected from Table 2.

[0129] In some embodiments, the anti-TfR antibodies of the present disclosure comprises the CDR-H1, CDR-H2, CDR-H3, CDR-L1, CDR-L2, and CDR-L3 as provided for any one of the anti-TfR antibodies selected from Table 2. In some embodiments, antibody heavy and light chain CDR3 domains may play a particularly important role in the binding specificity/affinity of an antibody for an antigen. Accordingly, the anti-TfR antibodies of the disclosure may include at least the heavy and/or (e.g., and) light chain CDR3s of any one of the anti-TfR antibodies selected from Table 2.

[0130] In some examples, any of the anti-TfR antibodies of the disclosure have one or more CDR (e.g., CDR-H or CDR-L) sequences substantially similar to any of the CDR-H1, CDR-H2, CDR-H3, CDR-L1, CDR-L2, and/or (e.g., and) CDR-L3 sequences from one of the anti-TfR antibodies selected from Table 2. In some embodiments, the position of one or more CDRs along the VH (e.g., CDR-H1, CDR-H2, or CDR-H3) and/or (e.g., and) VL (e.g., CDR-L1, CDR-L2, or CDR-L3) region of an antibody described herein can vary by one, two, three, four, five, or six amino acid positions so long as immunospecific binding to transferrin receptor (e.g., human transferrin receptor) is maintained (e.g., substantially maintained, for example, at least 50%, at least 60%, at least 70%, at least 80%, at least 90%, at least 95% of the binding of the original antibody from which it is derived). For example, in some embodiments, the position defining a CDR of any antibody described herein can vary by shifting the N-terminal and/or (e.g., and) C-terminal boundary of the CDR by one, two, three, four, five, or six amino acids, relative to the CDR position of any one of the antibodies described herein, so long as immunospecific binding to transferrin receptor (e.g., human transferrin receptor) is maintained (e.g., substantially maintained, for example, at least 50%, at least 60%, at least 70%, at least 80%, at least 90%, at least 95% of the binding of the original antibody from which it is derived). In another embodiment, the length of one or more CDRs along the VH (e.g., CDR-H1, CDR-H2, or CDR-H3) and/or (e.g., and) VL (e.g., CDR-L1, CDR-L2, or CDR-L3) region of an antibody described herein can vary (e.g., be shorter or longer) by one, two, three, four, five, or more amino acids, so long as immunospecific binding to transferrin receptor (e.g., human transferrin receptor) is maintained (e.g., substantially maintained, for example, at least 50%, at least 60%, at least 70%, at least 80%, at least 90%, at least 95% of the binding of the original antibody from which it is derived).

[0131] Accordingly, in some embodiments, a CDR-L1, CDR-L2, CDR-L3, CDR-H1, CDR-H2, and/or (e.g., and) CDR-H3 described herein may be one, two, three, four, five or more amino acids shorter than one or more of the CDRs described herein (e.g., CDRS from any of the anti-TfR antibodies selected from Table 2) so long as immunospecific binding to transferrin receptor (e.g., human transferrin receptor) is maintained (e.g., substantially maintained, for example, at least 50%, at least 60%, at least 70%, at least 80%, at least 90%, at least 95% relative to the binding of the original antibody from which it is derived). In some embodiments, a CDR-L1, CDR-L2, CDR-L3, CDR-H1, CDR-H2, and/or (e.g., and) CDR-H3 described herein may be one, two, three, four, five or more amino acids longer than one or more of the CDRs described herein (e.g., CDRS from any of the anti-TfR antibodies selected from Table 2) so long as immunospecific binding to transferrin receptor (e.g., human transferrin receptor) is maintained (e.g., substantially maintained, for example, at least 50%, at least 60%, at least 70%, at least 80%, at least 90%, at least 95% relative to the binding of the original antibody from which it is derived). In some embodiments, the amino portion of a CDR-L1, CDR-L2, CDR-L3, CDR-H1, CDR-H2, and/or (e.g., and) CDR-H3 described herein can be extended by one, two, three, four, five or more amino acids compared to one or more of the CDRs described herein (e.g., CDRS from any of the anti-TfR antibodies selected from Table 2) so long as immunospecific binding to transferrin receptor (e.g., human transferrin receptor is maintained (e.g., substantially maintained, for example, at least 50%, at least 60%, at least 70%, at least 80%, at least 90%, at least 95% relative to the binding of the original antibody from which it is derived). In some embodiments, the carboxy portion of a CDR-L1, CDR-L2, CDR-L3, CDR-H1, CDR-H2, and/or (e.g., and) CDR-H3 described herein can be extended by one, two, three, four, five or more amino acids compared to one or more of the CDRs described herein (e.g., CDRS from any of the anti-TfR antibodies selected from Table 2) so long as immunospecific binding to transferrin receptor (e.g., human transferrin receptor) is maintained (e.g., substantially maintained, for example, at least 50%, at least 60%, at least 70%, at least 80%, at least 90%, at least 95% relative to the binding of the original antibody from which it is derived). In some embodiments, the amino portion of a CDR-L1, CDR-L2, CDR-L3, CDR-H1, CDR-H2, and/or (e.g., and) CDR-H3 described herein can be shortened by one, two, three, four, five or more amino acids compared to one or more of the CDRs described herein (e.g., CDRS from any of the anti-TfR antibodies selected from Table 2) so long as immunospecific binding to transferrin receptor (e.g., human transferrin receptor) is maintained (e.g., substantially maintained, for example, at least 50%, at least 60%, at least 70%, at least 80%, at least 90%, at least 95% relative to the binding of the original antibody from which it is derived). In some embodiments, the carboxy portion of a CDR-L1, CDR-L2, CDR-L3, CDR-H1, CDR-H2, and/or (e.g., and) CDR-H3 described herein can be shortened by one, two, three, four, five or more amino acids compared to one or more of the CDRs described herein (e.g., CDRS from any of the anti-TfR antibodies selected from Table 2) so long as immunospecific binding to transferrin receptor (e.g., human transferrin receptor) is maintained (e.g., substantially maintained, for example, at least 50%, at least 60%, at least 70%, at least 80%, at least 90%, at least 95% relative to the binding of the original antibody from which it is derived). Any method can be used to ascertain whether immunospecific binding to transferrin receptor (e.g., human transferrin receptor) is maintained, for example, using binding assays and conditions described in the art.

[0132] In some examples, any of the anti-TfR antibodies of the disclosure have one or more CDR (e.g., CDR-H or CDR-L) sequences substantially similar to any one of the anti-TfR antibodies selected from Table 2. For example, the antibodies may include one or more CDR sequence(s) from any of the anti-TfR antibodies selected from Table 2 containing up to 5, 4, 3, 2, or 1 amino acid residue variations as compared to the corresponding CDR region in any one of the CDRs provided herein (e.g., CDRs from any of the anti-TfR antibodies selected from Table 2) so long as immunospecific binding to transferrin receptor (e.g., human transferrin receptor) is maintained (e.g., substantially maintained, for example, at least 50%, at least 60%, at least 70%, at least 80%, at least 90%, at least 95% relative to the binding of the original antibody from which it is derived). In some embodiments, any of the amino acid variations in any of the CDRs provided herein may be conservative variations. Conservative variations can be introduced into the CDRs at positions where the residues are not likely to be involved in interacting with a transferrin receptor protein (e.g., a human transferrin receptor protein), for example, as determined based on a crystal structure. Some aspects of the disclosure provide anti-TfR antibodies that comprise one or more of the heavy chain variable (VH) and/or (e.g., and) light chain variable (VL) domains provided herein. In some embodiments, any of the VH domains provided herein include one or more of the CDR-H sequences (e.g., CDR-H1, CDR-H2, and CDR-H3) provided herein, for example, any of the CDR-H sequences provided in any one of the anti-TfR selected from Table 2. In some embodiments, any of the VL domains provided herein include one or more of the CDR-L sequences (e.g., CDR-L1, CDR-L2, and CDR-L3) provided herein, for example, any of the CDR-L sequences provided in any one of the anti-TfR antibodies selected from Table 2.

[0133] In some embodiments, the anti-TfR antibodies of the disclosure include any antibody that includes a heavy chain variable domain and/or (e.g., and) a light chain variable domain of any one of the anti-TfR antibodies selected from Table 2, and variants thereof. In some embodiments, anti-TfR antibodies of the disclosure include any antibody that includes the heavy chain variable and light chain variable pairs of any anti-TfR antibodies selected from Table 2.

[0134] Aspects of the disclosure provide anti-TfR antibodies having a heavy chain variable (VH) and/or (e.g., and) a light chain variable (VL) domain amino acid sequence homologous to any of those described herein. In some embodiments, the anti-TfR antibody comprises a heavy chain variable sequence or a light chain variable sequence that is at least 75% (e.g., 80%, 85%, 90%, 95%, 98%, or 99%) identical to the heavy chain variable sequence and/ or any light chain variable sequence of any one of the anti-TfR antibodies selected from Table 2. In some embodiments, the homologous heavy chain variable and/or (e.g., and) a light chain variable amino acid sequences do not vary within any of the CDR sequences provided herein. For example, in some embodiments, the degree of sequence variation (e.g., 75%, 80%, 85%, 90%, 95%, 98%, or 99%) may occur within a heavy chain variable and/or (e.g., and) a light chain variable sequence excluding any of the CDR sequences provided herein. In some embodiments, any of the anti-TfR antibodies provided herein comprise a heavy chain variable sequence and a light chain variable sequence that comprises a framework sequence that is at least 75%, 80%, 85%, 90%, 95%, 98%, or 99% identical to the framework sequence of any anti-TfR antibodies selected from Table 2.

[0135] In some embodiments, the anti-TfR antibody of the present disclosure comprises a CDR-H1, a CDR-H2, and a CDR-H3 of a heavy chain variable domain having the amino acid sequence of SEQ ID NO: 7. Alternatively or in addition (e.g., in addition), the anti-TfR antibody of the present disclosure comprises a CDR-L1, a CDR-L2, and a CDR-L3 of a light chain variable domain having the amino acid sequence of SEQ ID NO: 8.

[0136] In some embodiments, the anti-TfR antibody of the present disclosure comprises a CDR-H1 having the amino acid sequence of SEQ ID NO: 1 (according to the IMGT definition system), a CDR-H2 having the amino acid sequence of SEQ ID NO: 2 (according to the IMGT definition system), a CDR-H3 having the amino acid sequence of SEQ ID NO: 3 (according to the IMGT definition system), a CDR-L1 having the amino acid sequence of SEQ ID NO: 4 (according to the IMGT definition system), a CDR-L2 having the amino acid sequence of SEQ ID NO: 5 (according to the IMGT definition system), and a CDR-L3 having the amino acid sequence of SEQ ID NO: 6 (according to the IMGT definition system).

[0137] In some embodiments, the anti-TfR antibody of the present disclosure comprises: a CDR-H1 having the amino acid sequence of SEQ ID NO: 1; a CDR-H2 having the amino acid sequence of SEQ ID NO: 2 with an amino acid substitution at position 5 (e.g., the asparagine at position 5 is substituted, e.g., with any one of Arg (R), Lys (K), Asp (D), Glu (E), Gln (Q), His (H), Ser (S), Thr (T), Tyr (Y), Cys (C), Trp (W), Met (M), Ala (A), Ile (I), Leu (L), Phe (F), Val (V), Pro (P), Gly (G)); and a CDR-H3 having the amino acid sequence of SEQ ID NO: 3. Alternatively or in addition (e.g., in addition), the anti-TfR antibody of the present disclosure comprises: a CDR-L1 having the amino acid sequence of SEQ ID NO: 4; a CDR-L2 having the amino acid sequence of SEQ ID NO: 5; and a CDR-L3 having the amino acid sequence of SEQ ID NO: 6. In some embodiments, the amino acid substitution at position 5 of the CDR-H2 as set forth in SEQ ID NO: 2 is N5T or N5S.

[0138] In some embodiments, the anti-TfR antibody of the present disclosure comprises: a CDR-H1 having the amino acid sequence of SEQ ID NO: 1; a CDR-H2 having the amino acid sequence of SEQ ID NO: 262 or SEQ ID NO: 80; and a CDR-H3 having the amino acid sequence of SEQ ID NO: 3. Alternatively or in addition (e.g., in addition), the anti-TfR antibody of the present disclosure comprises: a CDR-L1 having the amino acid sequence of SEQ ID NO: 4; a CDR-L2 having the amino acid sequence of SEQ ID NO: 5; and a CDR-L3 having the amino acid sequence of SEQ ID NO: 6.

[0139] In some embodiments, anti-TfR antibody of the present disclosure comprises a CDR-H1, a CDR-H2, and a CDR-H3, which collectively contains no more than 5 amino acid variations (e.g., no more than 5, 4, 3, 2, or 1 amino acid variation) as compared with the CDR-H1 having the amino acid sequence of SEQ ID NO: 1, CDR-H2 having the amino acid sequence of SEQ ID NO: 2, SEQ ID NO: 262 or SEQ ID NO: 80, and CDR-H3 having the amino acid sequence of SEQ ID NO: 3. “Collectively,” as used anywhere in the present disclosure, means that the total number of amino acid variations in all of the three heavy chain CDRs is within the defined range. Alternatively or in addition (e.g., in addition), the anti-TfR antibody of the present disclosure comprises a CDR-L1, a CDR-L2, and a CDR-L3, which collectively contains no more than 5 amino acid variations (e.g., no more than 5, 4, 3, 2 or 1 amino acid variation) as compared with the CDR-L1 having the amino acid sequence of SEQ ID NO: 4, CDR-L2 having the amino acid sequence of SEQ ID NO: 5, and CDR-L3 having the amino acid sequence of SEQ ID NO: 6.

[0140] In some embodiments, the anti-TfR antibody of the present disclosure comprises a CDR-H1, a CDR-H2, and a CDR-H3 that collectively are at least 75% (e.g., 75%, 80%, 85%, 90%, 95%, 98%, or 99%) identical to the CDR-H1 having the amino acid sequence of SEQ ID NO: 1, CDR-H2 having the amino acid sequence of SEQ ID NO: 2, SEQ ID NO: 262 or SEQ ID NO: 80, and CDR-H3 having the amino acid sequence of SEQ ID NO: 3. Alternatively or in addition (e.g., in addition), the anti-TfR antibody of the present disclosure comprises a CDR-L1, a CDR-L2, and a CDR-L3 that collectively are at least 75% (e.g., 75%, 80%, 85%, 90%, 95%, 98%, or 99%) identical to the to the CDR-L1 having the amino acid sequence of SEQ ID NO: 4, CDR-L2 having the amino acid sequence of SEQ ID NO: 5, and CDR-L3 having the amino acid sequence of SEQ ID NO: 6.

[0141] In some embodiments, the anti-TfR antibody of the present disclosure comprises: a CDR-H1 having no more than 3 amino acid variations (e.g., no more than 3, 2, or 1 amino acid variation) as compared with the CDR-H1 having the amino acid sequence of SEQ ID NO: 1; a CDR-H2 having no more than 3 amino acid variations (e.g., no more than 3, 2, or 1 amino acid variation) as compared with the CDR-H2 having the amino acid sequence of SEQ ID NO: 2, SEQ ID NO: 262 or SEQ ID NO: 80; and/or (e.g., and) a CDR-H3 having no more than 3 amino acid variations (e.g., no more than 3, 2, or 1 amino acid variation) as compared with the CDR-H3 having the amino acid sequence of SEQ ID NO: 3. Alternatively or in addition (e.g., in addition), the anti-TfR antibody of the present disclosure comprises: a CDR-L1 having no more than 3 amino acid variations (e.g., no more than 3, 2, or 1 amino acid variation) as compared with the CDR-L1 having the amino acid sequence of SEQ ID NO: 4; a CDR-L2 having no more than 3 amino acid variations (e.g., no more than 3, 2, or 1 amino acid variation) as compared with the CDR-L2 having the amino acid sequence of SEQ ID NO: 5; and/or (e.g., and) a CDR-L3 having no more than 3 amino acid variations (e.g., no more than 3, 2, or 1 amino acid variation) as compared with the CDR-L3 having the amino acid sequence of SEQ ID NO: 6.

[0142] In some embodiments, the anti-TfR antibody of the present disclosure comprises a VH comprising the amino acid sequence of SEQ ID NO: 7. Alternatively or in addition (e.g., in addition), the anti-TfR antibody of the present disclosure comprises a VL comprising the amino acid sequence of SEQ ID NO: 8.

[0143] In some embodiments, the anti-TfR antibody of the present disclosure comprises a VH containing no more than 25 amino acid variations (e.g., no more than 25, 24, 23, 22, 21, 20, 19, 18, 17, 16, 15, 14, 13, 12, 11, 10, 9, 8, 7, 6, 5, 4, 3, 2, or 1 amino acid variation)no more than 25 amino acid variations (e.g., no more than 25, 24, 23, 22, 21, 20, 19, 18, 17, 16, 15, 14, 13, 12, 11, 10, 9, 8, 7, 6, 5, 4, 3, 2, or 1 amino acid variation) as compared with the VH as set forth in SEQ ID NO: 7. Alternatively or in addition (e.g., in addition), the anti-TfR antibody of the present disclosure comprises a VL containing no more than 25 amino acid variations (e.g., no more than 25, 24, 23, 22, 21, 20, 19, 18, 17, 16, 15, 14, 13, 12, 11, 10, 9, 8, 7, 6, 5, 4, 3, 2, or 1 amino acid variation) as compared with the VL as set forth in SEQ ID NO: 8.

[0144] n some embodiments, the anti-TfR antibody of the present disclosure comprises a VH comprising an amino acid sequence that is at least 75% (e.g., 75%, 80%, 85%, 90%, 95%, 98%, or 99%) identical to the VH as set forth in SEQ ID NO: 7. Alternatively or in addition (e.g., in addition), the anti-TfR antibody of the present disclosure comprises a VL comprising an amino acid sequence that is at least 75% (e.g., 75%, 80%, 85%, 90%, 95%, 98%, or 99%) identical to the VL as set forth in SEQ ID NO: 8.

[0145] In some embodiments, the anti-TfR antibody of the present disclosure comprises a VH as set forth in SEQ ID NO: 7 with an amino acid substitution at position 55 (e.g., the asparagine at position 55 is substituted, e.g., with any one of Arg (R), Lys (K), Asp (D), Glu (E), Gln (Q), His (H), Ser (S), Thr (T), Tyr (Y), Cys (C), Trp (W), Met (M), Ala (A), Ile (I), Leu (L), Phe (F), Val (V), Pro (P), Gly (G)). Alternatively or in addition (e.g., in addition), the anti-TfR antibody of the present disclosure comprises a VL as set forth in SEQ ID NO: 8. In some embodiments, the amino acid substitution at position 55 of the VH as set forth in SEQ ID NO: 7 is N55T or N55S. Amino acid position 55 in SEQ ID NO: 7 is assigned a number 54 when the VH set forth in SEQ ID NO: 7 is annotated using the Kabat numbering system. When N54T or N54S is referred to herein, it is referring to the mutations using the Kabat numbering system.

[0146] In some embodiments, the anti-TfR antibody of the present disclosure comprises a VH comprising an amino acid substitution at position 64 relative to SEQ ID NO: 7. In some embodiments, the anti-TfR antibody of the present disclosure comprises a VH comprising a Met at a position corresponding to position 64 of SEQ ID NO: 7. Alternatively or in addition (e.g., in addition), the anti-TfR antibody of the present disclosure comprises a VL comprising an amino acid sequence that is at least 80% (e.g., 80%, 85%, 90%, 95%, 98%, 99%, or 100%) identical to the VL as set forth in SEQ ID NO: 8.

[0147] In some embodiments, the anti-TfR antibody of the present disclosure comprises a CDR-H1, a CDR-H2, and a CDR-H3 of a heavy chain variable domain having the amino acid sequence of SEQ ID NO: 15. Alternatively or in addition (e.g., in addition), the anti-TfR antibody of the present disclosure comprises a CDR-L1, a CDR-L2, and a CDR-L3 of a light chain variable domain having the amino acid sequence of SEQ ID NO: 16.

[0148] In some embodiments, the anti-TfR antibody of the present disclosure comprises a CDR-H1 having the amino acid sequence of SEQ ID NO: 9 (according to the IMGT definition system), a CDR-H2 having the amino acid sequence of SEQ ID NO: 10 (according to the IMGT definition system), a CDR-H3 having the amino acid sequence of SEQ ID NO: 11 (according to the IMGT definition system), a CDR-L1 having the amino acid sequence of SEQ ID NO: 12 (according to the IMGT definition system), a CDR-L2 having the amino acid sequence of SEQ ID NO: 13 (according to the IMGT definition system), and a CDR-L3 having the amino acid sequence of SEQ ID NO: 14 (according to the IMGT definition system).

[0149] In some embodiments, anti-TfR antibody of the present disclosure comprises a CDR-H1, a CDR-H2, and a CDR-H3, which collectively contains no more than 5 amino acid variations (e.g., no more than 5, 4, 3, 2, or 1 amino acid variation) as compared with the CDR-H1 having the amino acid sequence of SEQ ID NO: 9, CDR-H2 having the amino acid sequence of SEQ ID NO: 10, and CDR-H3 having the amino acid sequence of SEQ ID NO: 11. Alternatively or in addition (e.g., in addition), the anti-TfR antibody of the present disclosure comprises a CDR-L1, a CDR-L2, and a CDR-L3, which collectively contains no more than 5 amino acid variations (e.g., no more than 5, 4, 3, 2 or 1 amino acid variation) as compared with the CDR-L1 having the amino acid sequence of SEQ ID NO: 12, CDR-L2 having the amino acid sequence of SEQ ID NO: 13, and CDR-L3 having the amino acid sequence of SEQ ID NO: 14.

[0150] In some embodiments, the anti-TfR antibody of the present disclosure comprises a CDR-H1, a CDR-H2, and a CDR-H3 that collectively are at least 75% (e.g., 75%, 80%, 85%, 90%, 95%, 98%, or 99%) identical to the CDR-H1 having the amino acid sequence of SEQ ID NO: 9, CDR-H2 having the amino acid sequence of SEQ ID NO: 10, and CDR-H3 having the amino acid sequence of SEQ ID NO: 11. Alternatively or in addition (e.g., in addition), the anti-TfR antibody of the present disclosure comprises a CDR-L1, a CDR-L2, and a CDR-L3 that collectively are at least 75% (e.g., 75%, 80%, 85%, 90%, 95%, 98%, or 99%) identical to the to the CDR-L1 having the amino acid sequence of SEQ ID NO: 12, CDR-L2 having the amino acid sequence of SEQ ID NO: 13, and CDR-L3 having the amino acid sequence of SEQ ID NO: 14.

[0151] In some embodiments, the anti-TfR antibody of the present disclosure comprises: a CDR-H1 having no more than 3 amino acid variations (e.g., no more than 3, 2, or 1 amino acid variation) as compared with the CDR-H1 having the amino acid sequence of SEQ ID NO: 9; a CDR-H2 having no more than 3 amino acid variations (e.g., no more than 3, 2, or 1 amino acid variation) as compared with the CDR-H2 having the amino acid sequence of SEQ ID NO: 10; and/or (e.g., and) a CDR-H3 having no more than 3 amino acid variations (e.g., no more than 3, 2, or 1 amino acid variation) as compared with the CDR-H3 having the amino acid sequence of SEQ ID NO: 11. Alternatively or in addition (e.g., in addition), the anti-TfR antibody of the present disclosure comprises: a CDR-L1 having no more than 3 amino acid variations (e.g., no more than 3, 2, or 1 amino acid variation) as compared with the CDR-L1 having the amino acid sequence of SEQ ID NO: 12; a CDR-L2 having no more than 3 amino acid variations (e.g., no more than 3, 2, or 1 amino acid variation) as compared with the CDR-L2 having the amino acid sequence of SEQ ID NO: 13; and/or (e.g., and) a CDR-L3 having no more than 3 amino acid variations (e.g., no more than 3, 2, or 1 amino acid variation) as compared with the CDR-L3 having the amino acid sequence of SEQ ID NO: 14.

[0152] In some embodiments, the anti-TfR antibody of the present disclosure comprises a VH comprising the amino acid sequence of SEQ ID NO: 15. Alternatively or in addition (e.g., in addition), the anti-TfR antibody of the present disclosure comprises a VL comprising the amino acid sequence of SEQ ID NO: 16.

[0153] In some embodiments, the anti-TfR antibody of the present disclosure comprises a VH containing no more than 25 amino acid variations (e.g., no more than 25, 24, 23, 22, 21, 20, 19, 18, 17, 16, 15, 14, 13, 12, 11, 10, 9, 8, 7, 6, 5, 4, 3, 2, or 1 amino acid variation) as compared with the VH as set forth in SEQ ID NO: 15. Alternatively or in addition (e.g., in addition), the anti-TfR antibody of the present disclosure comprises a VL containing no more than 25 amino acid variations (e.g., no more than 25, 24, 23, 22, 21, 20, 19, 18, 17, 16, 15, 14, 13, 12, 11, 10, 9, 8, 7, 6, 5, 4, 3, 2, or 1 amino acid variation) as compared with the VL as set forth in SEQ ID NO: 16.

[0154] In some embodiments, the anti-TfR antibody of the present disclosure comprises a VH comprising an amino acid sequence that is at least 75% (e.g., 75%, 80%, 85%, 90%, 95%, 98%, or 99%) identical to the VH as set forth in SEQ ID NO: 15. Alternatively or in addition (e.g., in addition), the anti-TfR antibody of the present disclosure comprises a VL comprising an amino acid sequence that is at least 75% (e.g., 75%, 80%, 85%, 90%, 95%, 98%, or 99%) identical to the VL as set forth in SEQ ID NO: 16.

[0155] In some embodiments, the anti-TfR antibody of the present disclosure comprises a CDR-H1, a CDR-H2, and a CDR-H3 of a heavy chain variable domain having the amino acid sequence of SEQ ID NO: 23. Alternatively or in addition (e.g., in addition), the anti-TfR antibody of the present disclosure comprises a CDR-L1, a CDR-L2, and a CDR-L3 of a light chain variable domain having the amino acid sequence of SEQ ID NO: 24.

[0156] In some embodiments, the anti-TfR antibody of the present disclosure comprises a CDR-H1 having the amino acid sequence of SEQ ID NO: 17 (according to the IMGT definition system), a CDR-H2 having the amino acid sequence of SEQ ID NO: 18 (according to the IMGT definition system), a CDR-H3 having the amino acid sequence of SEQ ID NO: 19 (according to the IMGT definition system), a CDR-L1 having the amino acid sequence of SEQ ID NO: 20 (according to the IMGT definition system), a CDR-L2 having the amino acid sequence of SEQ ID NO: 21 (according to the IMGT definition system), and a CDR-L3 having the amino acid sequence of SEQ ID NO: 22 (according to the IMGT definition system).

[0157] In some embodiments, the anti-TfR antibody of the present disclosure comprises: a CDR-H1 having the amino acid sequence of SEQ ID NO: 17 with an amino acid substitution at position 8 (e.g., the cysteine at position 8 is substituted, e.g., with any one of Arg (R), Lys (K), Asp (D), Glu (E), Gln (Q), His (H), Ser (S), Thr (T), Tyr (Y), Asn (N), Trp (W), Met (M), Ala (A), Ile (I), Leu (L), Phe (F), Val (V), Pro (P), Gly (G)); a CDR-H2 having the amino acid sequence of SEQ ID NO: 18; and a CDR-H3 having the amino acid sequence of SEQ ID NO: 19. Alternatively or in addition (e.g., in addition), the anti-TfR antibody of the present disclosure comprises: a CDR-L1 having the amino acid sequence of SEQ ID NO: 20; a CDR-L2 having the amino acid sequence of SEQ ID NO: 21; and a CDR-L3 having the amino acid sequence of SEQ ID NO: 22. In some embodiments, the amino acid substitution at position 8 of the CDR-H1 as set forth in SEQ ID NO: 17 is C8D or C8Y.

[0158] In some embodiments, the anti-TfR antibody of the present disclosure comprises: a CDR-H1 having the amino acid sequence of SEQ ID NO: 266 or SEQ ID NO: 268; a CDR-H2 having the amino acid sequence of SEQ ID NO: 18; and a CDR-H3 having the amino acid sequence of SEQ ID NO: 19. Alternatively or in addition (e.g., in addition), the anti-TfR antibody of the present disclosure comprises: a CDR-L1 having the amino acid sequence of SEQ ID NO: 20; a CDR-L2 having the amino acid sequence of SEQ ID NO: 21; and a CDR-L3 having the amino acid sequence of SEQ ID NO: 22.

[0159] In some embodiments, anti-TfR antibody of the present disclosure comprises a CDR-H1, a CDR-H2, and a CDR-H3, which collectively contains no more than 5 amino acid variations (e.g., no more than 5, 4, 3, 2, or 1 amino acid variation) as compared with the CDR-H1 having the amino acid sequence of SEQ ID NO: 17, SEQ ID NO: 266, or SEQ ID NO: 268, CDR-H2 having the amino acid sequence of SEQ ID NO: 18, and CDR-H3 having the amino acid sequence of SEQ ID NO: 19. Alternatively or in addition (e.g., in addition), the anti-TfR antibody of the present disclosure comprises a CDR-L1, a CDR-L2, and a CDR-L3, which collectively contains no more than 5 amino acid variations (e.g., no more than 5, 4, 3, 2 or 1 amino acid variation) as compared with the CDR-L1 having the amino acid sequence of SEQ ID NO: 20, CDR-L2 having the amino acid sequence of SEQ ID NO: 21, and CDR-L3 having the amino acid sequence of SEQ ID NO: 22.

[0160] In some embodiments, the anti-TfR antibody of the present disclosure comprises a CDR-H1, a CDR-H2, and a CDR-H3 that collectively are at least 75% (e.g., 75%, 80%, 85%, 90%, 95%, 98%, or 99%) identical to the CDR-H1 having the amino acid sequence of SEQ ID NO: 17, SEQ ID NO: 266, or SEQ ID NO: 268, CDR-H2 having the amino acid sequence of SEQ ID NO: 18, and CDR-H3 having the amino acid sequence of SEQ ID NO: 19. Alternatively or in addition (e.g., in addition), the anti-TfR antibody of the present disclosure comprises a CDR-L1, a CDR-L2, and a CDR-L3 that collectively are at least 75% (e.g., 75%, 80%, 85%, 90%, 95%, 98%, or 99%) identical to the to the CDR-L1 having the amino acid sequence of SEQ ID NO: 20, CDR-L2 having the amino acid sequence of SEQ ID NO: 21, and CDR-L3 having the amino acid sequence of SEQ ID NO: 22.

[0161] In some embodiments, the anti-TfR antibody of the present disclosure comprises: a CDR-H1 having no more than 3 amino acid variations (e.g., no more than 3, 2, or 1 amino acid variation) as compared with the CDR-H1 having the amino acid sequence of SEQ ID NO: 17, SEQ ID NO: 266, or SEQ ID NO: 268; a CDR-H2 having no more than 3 amino acid variations (e.g., no more than 3, 2, or 1 amino acid variation) as compared with the CDR-H2 having the amino acid sequence of SEQ ID NO: 18; and/or (e.g., and) a CDR-H3 having no more than 3 amino acid variations (e.g., no more than 3, 2, or 1 amino acid variation) as compared with the CDR-H3 having the amino acid sequence of SEQ ID NO: 19. Alternatively or in addition (e.g., in addition), the anti-TfR antibody of the present disclosure comprises: a CDR-L1 having no more than 3 amino acid variations (e.g., no more than 3, 2, or 1 amino acid variation) as compared with the CDR-L1 having the amino acid sequence of SEQ ID NO: 20; a CDR-L2 having no more than 3 amino acid variations (e.g., no more than 3, 2, or 1 amino acid variation) as compared with the CDR-L2 having the amino acid sequence of SEQ ID NO: 21; and/or (e.g., and) a CDR-L3 having no more than 3 amino acid variations (e.g., no more than 3, 2, or 1 amino acid variation) as compared with the CDR-L3 having the amino acid sequence of SEQ ID NO: 22.

[0162] In some embodiments, the anti-TfR antibody of the present disclosure comprises a VH comprising the amino acid sequence of SEQ ID NO: 23. Alternatively or in addition (e.g., in addition), the anti-TfR antibody of the present disclosure comprises a VL comprising the amino acid sequence of SEQ ID NO: 24.

[0163] In some embodiments, the anti-TfR antibody of the present disclosure comprises a VH containing no more than 25 amino acid variations (e.g., no more than 25, 24, 23, 22, 21, 20, 19, 18, 17, 16, 15, 14, 13, 12, 11, 10, 9, 8, 7, 6, 5, 4, 3, 2, or 1 amino acid variation)no more than 25 amino acid variations (e.g., no more than 25, 24, 23, 22, 21, 20, 19, 18, 17, 16, 15, 14, 13, 12, 11, 10, 9, 8, 7, 6, 5, 4, 3, 2, or 1 amino acid variation) as compared with the VH as set forth in SEQ ID NO: 23. Alternatively or in addition (e.g., in addition), the anti-TfR antibody of the present disclosure comprises a VL containing no more than 25 amino acid variations (e.g., no more than 25, 24, 23, 22, 21, 20, 19, 18, 17, 16, 15, 14, 13, 12, 11, 10, 9, 8, 7, 6, 5, 4, 3, 2, or 1 amino acid variation) as compared with the VL as set forth in SEQ ID NO: 24.

[0164] n some embodiments, the anti-TfR antibody of the present disclosure comprises a VH comprising an amino acid sequence that is at least 75% (e.g., 75%, 80%, 85%, 90%, 95%, 98%, or 99%) identical to the VH as set forth in SEQ ID NO: 23. Alternatively or in addition (e.g., in addition), the anti-TfR antibody of the present disclosure comprises a VL comprising an amino acid sequence that is at least 75% (e.g., 75%, 80%, 85%, 90%, 95%, 98%, or 99%) identical to the VL as set forth in SEQ ID NO: 24.

[0165] In some embodiments, the anti-TfR antibody of the present disclosure comprises a VH as set forth in SEQ ID NO: 23 with an amino acid substitution at position 33 (e.g., the cysteine at position 33 is substituted, e.g., with any one of Arg (R), Lys (K), Asp (D), Glu (E), Gln (Q), His (H), Ser (S), Thr (T), Tyr (Y), Asn (N), Trp (W), Met (M), Ala (A), Ile (I), Leu (L), Phe (F), Val (V), Pro (P), Gly (G)). Alternatively or in addition (e.g., in addition), the anti-TfR antibody of the present disclosure comprises a VL as set forth in SEQ ID NO: 24. In some embodiments, the amino acid substitution at position 33 of the VH as set forth in SEQ ID NO: 23 is C33D or C33Y. Amino acid 33 in SEQ ID NO: 23 is assigned a number 33 when the VH set forth in SEQ ID NO: 23 is annotated with the Kabat numbering system.

[0166] In some embodiments, the anti-TfR antibody of the present disclosure comprises a CDR-H1, a CDR-H2, and a CDR-H3 of a heavy chain variable domain having the amino acid sequence of SEQ ID NO: 31. Alternatively or in addition (e.g., in addition), the anti-TfR antibody of the present disclosure comprises a CDR-L1, a CDR-L2, and a CDR-L3 of a light chain variable domain having the amino acid sequence of SEQ ID NO: 32.

[0167] In some embodiments, the anti-TfR antibody of the present disclosure comprises a CDR-H1 having the amino acid sequence of SEQ ID NO: 25 (according to the IMGT definition system), a CDR-H2 having the amino acid sequence of SEQ ID NO: 26 (according to the IMGT definition system), a CDR-H3 having the amino acid sequence of SEQ ID NO: 27 (according to the IMGT definition system), a CDR-L1 having the amino acid sequence of SEQ ID NO: 28 (according to the IMGT definition system), a CDR-L2 having the amino acid sequence of SEQ ID NO: 29 (according to the IMGT definition system), and a CDR-L3 having the amino acid sequence of SEQ ID NO: 30 (according to the IMGT definition system).

[0168] In some embodiments, anti-TfR antibody of the present disclosure comprises a CDR-H1, a CDR-H2, and a CDR-H3, which collectively contains no more than 5 amino acid variations (e.g., no more than 5, 4, 3, 2, or 1 amino acid variation) as compared with the CDR-H1 having the amino acid sequence of SEQ ID NO: 25, CDR-H2 having the amino acid sequence of SEQ ID NO: 26, and CDR-H3 having the amino acid sequence of SEQ ID NO: 27. Alternatively or in addition (e.g., in addition), the anti-TfR antibody of the present disclosure comprises a CDR-L1, a CDR-L2, and a CDR-L3, which collectively contains no more than 5 amino acid variations (e.g., no more than 5, 4, 3, 2 or 1 amino acid variation) as compared with the CDR-L1 having the amino acid sequence of SEQ ID NO: 28, CDR-L2 having the amino acid sequence of SEQ ID NO: 29, and CDR-L3 having the amino acid sequence of SEQ ID NO: 30.

[0169] In some embodiments, the anti-TfR antibody of the present disclosure comprises a CDR-H1, a CDR-H2, and a CDR-H3 that collectively are at least 75% (e.g., 75%, 80%, 85%, 90%, 95%, 98%, or 99%) identical to the CDR-H1 having the amino acid sequence of SEQ ID NO: 25, CDR-H2 having the amino acid sequence of SEQ ID NO: 26, and CDR-H3 having the amino acid sequence of SEQ ID NO: 27. Alternatively or in addition (e.g., in addition), the anti-TfR antibody of the present disclosure comprises a CDR-L1, a CDR-L2, and a CDR-L3 that collectively are at least 75% (e.g., 75%, 80%, 85%, 90%, 95%, 98%, or 99%) identical to the to the CDR-L1 having the amino acid sequence of SEQ ID NO: 28, CDR-L2 having the amino acid sequence of SEQ ID NO: 29, and CDR-L3 having the amino acid sequence of SEQ ID NO: 30.

[0170] In some embodiments, the anti-TfR antibody of the present disclosure comprises: a CDR-H1 having no more than 3 amino acid variations (e.g., no more than 3, 2, or 1 amino acid variation) as compared with the CDR-H1 having the amino acid sequence of SEQ ID NO: 25; a CDR-H2 having no more than 3 amino acid variations (e.g., no more than 3, 2, or 1 amino acid variation) as compared with the CDR-H2 having the amino acid sequence of SEQ ID NO: 26; and/or (e.g., and) a CDR-H3 having no more than 3 amino acid variations (e.g., no more than 3, 2, or 1 amino acid variation) as compared with the CDR-H3 having the amino acid sequence of SEQ ID NO: 27. Alternatively or in addition (e.g., in addition), the anti-TfR antibody of the present disclosure comprises: a CDR-L1 having no more than 3 amino acid variations (e.g., no more than 3, 2, or 1 amino acid variation) as compared with the CDR-L1 having the amino acid sequence of SEQ ID NO: 28; a CDR-L2 having no more than 3 amino acid variations (e.g., no more than 3, 2, or 1 amino acid variation) as compared with the CDR-L2 having the amino acid sequence of SEQ ID NO: 29; and/or (e.g., and) a CDR-L3 having no more than 3 amino acid variations (e.g., no more than 3, 2, or 1 amino acid variation) as compared with the CDR-L3 having the amino acid sequence of SEQ ID NO: 30.

[0171] In some embodiments, the anti-TfR antibody of the present disclosure comprises a VH comprising the amino acid sequence of SEQ ID NO: 31. Alternatively or in addition (e.g., in addition), the anti-TfR antibody of the present disclosure comprises a VL comprising the amino acid sequence of SEQ ID NO: 32.

[0172] In some embodiments, the anti-TfR antibody of the present disclosure comprises a VH containing no more than 25 amino acid variations (e.g., no more than 25, 24, 23, 22, 21, 20, 19, 18, 17, 16, 15, 14, 13, 12, 11, 10, 9, 8, 7, 6, 5, 4, 3, 2, or 1 amino acid variation)no more than 25 amino acid variations (e.g., no more than 25, 24, 23, 22, 21, 20, 19, 18, 17, 16, 15, 14, 13, 12, 11, 10, 9, 8, 7, 6, 5, 4, 3, 2, or 1 amino acid variation) as compared with the VH as set forth in SEQ ID NO: 31. Alternatively or in addition (e.g., in addition), the anti-TfR antibody of the present disclosure comprises a VL containing no more than 25 amino acid variations (e.g., no more than 25, 24, 23, 22, 21, 20, 19, 18, 17, 16, 15, 14, 13, 12, 11, 10, 9, 8, 7, 6, 5, 4, 3, 2, or 1 amino acid variation) as compared with the VL as set forth in SEQ ID NO: 32.

[0173] In some embodiments, the anti-TfR antibody of the present disclosure comprises a VH comprising an amino acid sequence that is at least 75% (e.g., 75%, 80%, 85%, 90%, 95%, 98%, or 99%) identical to the VH as set forth in SEQ ID NO: 31. Alternatively or in addition (e.g., in addition), the anti-TfR antibody of the present disclosure comprises a VL comprising an amino acid sequence that is at least 75% (e.g., 75%, 80%, 85%, 90%, 95%, 98%, or 99%) identical to the VL as set forth in SEQ ID NO: 32.

[0174] In some embodiments, the anti-TfR antibody of the present disclosure comprises a CDR-H1, a CDR-H2, and a CDR-H3 of a heavy chain variable domain having the amino acid sequence of SEQ ID NO: 39. Alternatively or in addition (e.g., in addition), the anti-TfR antibody of the present disclosure comprises a CDR-L1, a CDR-L2, and a CDR-L3 of a light chain variable domain having the amino acid sequence of SEQ ID NO: 40.

[0175] In some embodiments, the anti-TfR antibody of the present disclosure comprises a CDR-H1 having the amino acid sequence of SEQ ID NO: 33 (according to the IMGT definition system), a CDR-H2 having the amino acid sequence of SEQ ID NO: 34 (according to the IMGT definition system), a CDR-H3 having the amino acid sequence of SEQ ID NO: 35 (according to the IMGT definition system), a CDR-L1 having the amino acid sequence of SEQ ID NO: 36 (according to the IMGT definition system), a CDR-L2 having the amino acid sequence of SEQ ID NO: 37 (according to the IMGT definition system), and a CDR-L3 having the amino acid sequence of SEQ ID NO: 38 (according to the IMGT definition system).

[0176] In some embodiments, anti-TfR antibody of the present disclosure comprises a CDR-H1, a CDR-H2, and a CDR-H3, which collectively contains no more than 5 amino acid variations (e.g., no more than 5, 4, 3, 2, or 1 amino acid variation) as compared with the CDR-H1 having the amino acid sequence of SEQ ID NO: 33, CDR-H2 having the amino acid sequence of SEQ ID NO: 34, and CDR-H3 having the amino acid sequence of SEQ ID NO: 35. Alternatively or in addition (e.g., in addition), the anti-TfR antibody of the present disclosure comprises a CDR-L1, a CDR-L2, and a CDR-L3, which collectively contains no more than 5 amino acid variations (e.g., no more than 5, 4, 3, 2 or 1 amino acid variation) as compared with the CDR-L1 having the amino acid sequence of SEQ ID NO: 36, CDR-L2 having the amino acid sequence of SEQ ID NO: 37, and CDR-L3 having the amino acid sequence of SEQ ID NO: 38.

[0177] In some embodiments, the anti-TfR antibody of the present disclosure comprises a CDR-H1, a CDR-H2, and a CDR-H3 that collectively are at least 75% (e.g., 75%, 80%, 85%, 90%, 95%, 98%, or 99%) identical to the CDR-H1 having the amino acid sequence of SEQ ID NO: 33, CDR-H2 having the amino acid sequence of SEQ ID NO: 34, and CDR-H3 having the amino acid sequence of SEQ ID NO: 35. Alternatively or in addition (e.g., in addition), the anti-TfR antibody of the present disclosure comprises a CDR-L1, a CDR-L2, and a CDR-L3 that collectively are at least 75% (e.g., 75%, 80%, 85%, 90%, 95%, 98%, or 99%) identical to the to the CDR-L1 having the amino acid sequence of SEQ ID NO: 36, CDR-L2 having the amino acid sequence of SEQ ID NO: 37, and CDR-L3 having the amino acid sequence of SEQ ID NO: 38.

[0178] In some embodiments, the anti-TfR antibody of the present disclosure comprises: a CDR-H1 having no more than 3 amino acid variations (e.g., no more than 3, 2, or 1 amino acid variation) as compared with the CDR-H1 having the amino acid sequence of SEQ ID NO: 33; a CDR-H2 having no more than 3 amino acid variations (e.g., no more than 3, 2, or 1 amino acid variation) as compared with the CDR-H2 having the amino acid sequence of SEQ ID NO: 34; and/or (e.g., and) a CDR-H3 having no more than 3 amino acid variations (e.g., no more than 3, 2, or 1 amino acid variation) as compared with the CDR-H3 having the amino acid sequence of SEQ ID NO: 35. Alternatively or in addition (e.g., in addition), the anti-TfR antibody of the present disclosure comprises: a CDR-L1 having no more than 3 amino acid variations (e.g., no more than 3, 2, or 1 amino acid variation) as compared with the CDR-L1 having the amino acid sequence of SEQ ID NO: 36; a CDR-L2 having no more than 3 amino acid variations (e.g., no more than 3, 2, or 1 amino acid variation) as compared with the CDR-L2 having the amino acid sequence of SEQ ID NO: 37; and/or (e.g., and) a CDR-L3 having no more than 3 amino acid variations (e.g., no more than 3, 2, or 1 amino acid variation) as compared with the CDR-L3 having the amino acid sequence of SEQ ID NO: 38.

[0179] In some embodiments, the anti-TfR antibody of the present disclosure comprises a VH comprising the amino acid sequence of SEQ ID NO: 39. Alternatively or in addition (e.g., in addition), the anti-TfR antibody of the present disclosure comprises a VL comprising the amino acid sequence of SEQ ID NO: 40.

[0180] In some embodiments, the anti-TfR antibody of the present disclosure comprises a VH containing no more than 25 amino acid variations (e.g., no more than 25, 24, 23, 22, 21, 20, 19, 18, 17, 16, 15, 14, 13, 12, 11, 10, 9, 8, 7, 6, 5, 4, 3, 2, or 1 amino acid variation)no more than 25 amino acid variations (e.g., no more than 25, 24, 23, 22, 21, 20, 19, 18, 17, 16, 15, 14, 13, 12, 11, 10, 9, 8, 7, 6, 5, 4, 3, 2, or 1 amino acid variation) as compared with the VH as set forth in SEQ ID NO: 39. Alternatively or in addition (e.g., in addition), the anti-TfR antibody of the present disclosure comprises a VL containing no more than 25 amino acid variations (e.g., no more than 25, 24, 23, 22, 21, 20, 19, 18, 17, 16, 15, 14, 13, 12, 11, 10, 9, 8, 7, 6, 5, 4, 3, 2, or 1 amino acid variation) as compared with the VL as set forth in SEQ ID NO: 40.

[0181] In some embodiments, the anti-TfR antibody of the present disclosure comprises a VH comprising an amino acid sequence that is at least 75% (e.g., 75%, 80%, 85%, 90%, 95%, 98%, or 99%) identical to the VH as set forth in SEQ ID NO: 39. Alternatively or in addition (e.g., in addition), the anti-TfR antibody of the present disclosure comprises a VL comprising an amino acid sequence that is at least 75% (e.g., 75%, 80%, 85%, 90%, 95%, 98%, or 99%) identical to the VL as set forth in SEQ ID NO: 40.

[0182] In some embodiments, the anti-TfR antibody of the present disclosure comprises a CDR-H1, a CDR-H2, and a CDR-H3 of a heavy chain variable domain having the amino acid sequence of SEQ ID NO: 47. Alternatively or in addition (e.g., in addition), the anti-TfR antibody of the present disclosure comprises a CDR-L1, a CDR-L2, and a CDR-L3 of a light chain variable domain having the amino acid sequence of SEQ ID NO: 48.

[0183] In some embodiments, the anti-TfR antibody of the present disclosure comprises a CDR-H1 having the amino acid sequence of SEQ ID NO: 41 (according to the IMGT definition system), a CDR-H2 having the amino acid sequence of SEQ ID NO: 42 (according to the IMGT definition system), a CDR-H3 having the amino acid sequence of SEQ ID NO: 43 (according to the IMGT definition system), a CDR-L1 having the amino acid sequence of SEQ ID NO: 44 (according to the IMGT definition system), a CDR-L2 having the amino acid sequence of SEQ ID NO: 45 (according to the IMGT definition system), and a CDR-L3 having the amino acid sequence of SEQ ID NO: 46 (according to the IMGT definition system).

[0184] In some embodiments, anti-TfR antibody of the present disclosure comprises a CDR-H1, a CDR-H2, and a CDR-H3, which collectively contains no more than 5 amino acid variations (e.g., no more than 5, 4, 3, 2, or 1 amino acid variation) as compared with the CDR-H1 having the amino acid sequence of SEQ ID NO: 41, CDR-H2 having the amino acid sequence of SEQ ID NO: 42, and CDR-H3 having the amino acid sequence of SEQ ID NO: 43. Alternatively or in addition (e.g., in addition), the anti-TfR antibody of the present disclosure comprises a CDR-L1, a CDR-L2, and a CDR-L3, which collectively contains no more than 5 amino acid variations (e.g., no more than 5, 4, 3, 2 or 1 amino acid variation) as compared with the CDR-L1 having the amino acid sequence of SEQ ID NO: 44, CDR-L2 having the amino acid sequence of SEQ ID NO: 45, and CDR-L3 having the amino acid sequence of SEQ ID NO: 46.

[0185] In some embodiments, the anti-TfR antibody of the present disclosure comprises a CDR-H1, a CDR-H2, and a CDR-H3 that collectively are at least 75% (e.g., 75%, 80%, 85%, 90%, 95%, 98%, or 99%) identical to the CDR-H1 having the amino acid sequence of SEQ ID NO: 41, CDR-H2 having the amino acid sequence of SEQ ID NO: 42, and CDR-H3 having the amino acid sequence of SEQ ID NO: 43. Alternatively or in addition (e.g., in addition), the anti-TfR antibody of the present disclosure comprises a CDR-L1, a CDR-L2, and a CDR-L3 that collectively are at least 75% (e.g., 75%, 80%, 85%, 90%, 95%, 98%, or 99%) identical to the to the CDR-L1 having the amino acid sequence of SEQ ID NO: 44, CDR-L2 having the amino acid sequence of SEQ ID NO: 45, and CDR-L3 having the amino acid sequence of SEQ ID NO: 46.

[0186] In some embodiments, the anti-TfR antibody of the present disclosure comprises: a CDR-H1 having no more than 3 amino acid variations (e.g., no more than 3, 2, or 1 amino acid variation) as compared with the CDR-H1 having the amino acid sequence of SEQ ID NO: 41; a CDR-H2 having no more than 3 amino acid variations (e.g., no more than 3, 2, or 1 amino acid variation) as compared with the CDR-H2 having the amino acid sequence of SEQ ID NO: 42; and/or (e.g., and) a CDR-H3 having no more than 3 amino acid variations (e.g., no more than 3, 2, or 1 amino acid variation) as compared with the CDR-H3 having the amino acid sequence of SEQ ID NO: 43. Alternatively or in addition (e.g., in addition), the anti-TfR antibody of the present disclosure comprises: a CDR-L1 having no more than 3 amino acid variations (e.g., no more than 3, 2, or 1 amino acid variation) as compared with the CDR-L1 having the amino acid sequence of SEQ ID NO: 44; a CDR-L2 having no more than 3 amino acid variations (e.g., no more than 3, 2, or 1 amino acid variation) as compared with the CDR-L2 having the amino acid sequence of SEQ ID NO: 45; and/or (e.g., and) a CDR-L3 having no more than 3 amino acid variations (e.g., no more than 3, 2, or 1 amino acid variation) as compared with the CDR-L3 having the amino acid sequence of SEQ ID NO: 46.

[0187] In some embodiments, the anti-TfR antibody of the present disclosure comprises a VH comprising the amino acid sequence of SEQ ID NO: 47. Alternatively or in addition (e.g., in addition), the anti-TfR antibody of the present disclosure comprises a VL comprising the amino acid sequence of SEQ ID NO: 48.

[0188] In some embodiments, the anti-TfR antibody of the present disclosure comprises a VH containing no more than 25 amino acid variations (e.g., no more than 25, 24, 23, 22, 21, 20, 19, 18, 17, 16, 15, 14, 13, 12, 11, 10, 9, 8, 7, 6, 5, 4, 3, 2, or 1 amino acid variation)no more than 25 amino acid variations (e.g., no more than 25, 24, 23, 22, 21, 20, 19, 18, 17, 16, 15, 14, 13, 12, 11, 10, 9, 8, 7, 6, 5, 4, 3, 2, or 1 amino acid variation) as compared with the VH as set forth in SEQ ID NO: 47. Alternatively or in addition (e.g., in addition), the anti-TfR antibody of the present disclosure comprises a VL containing no more than 25 amino acid variations (e.g., no more than 25, 24, 23, 22, 21, 20, 19, 18, 17, 16, 15, 14, 13, 12, 11, 10, 9, 8, 7, 6, 5, 4, 3, 2, or 1 amino acid variation) as compared with the VL as set forth in SEQ ID NO: 48.

[0189] n some embodiments, the anti-TfR antibody of the present disclosure comprises a VH comprising an amino acid sequence that is at least 75% (e.g., 75%, 80%, 85%, 90%, 95%, 98%, or 99%) identical to the VH as set forth in SEQ ID NO: 47. Alternatively or in addition (e.g., in addition), the anti-TfR antibody of the present disclosure comprises a VL comprising an amino acid sequence that is at least 75% (e.g., 75%, 80%, 85%, 90%, 95%, 98%, or 99%) identical to the VL as set forth in SEQ ID NO: 48.

[0190] In some embodiments, the anti-TfR antibody of the present disclosure comprises a CDR-H1, a CDR-H2, and a CDR-H3 of a heavy chain variable domain having the amino acid sequence of SEQ ID NO: 54. Alternatively or in addition (e.g., in addition), the anti-TfR antibody of the present disclosure comprises a CDR-L1, a CDR-L2, and a CDR-L3 of a light chain variable domain having the amino acid sequence of SEQ ID NO: 55.

[0191] In some embodiments, the anti-TfR antibody of the present disclosure comprises a CDR-H1 having the amino acid sequence of SEQ ID NO: 49 (according to the IMGT definition system), a CDR-H2 having the amino acid sequence of SEQ ID NO: 50 (according to the IMGT definition system), a CDR-H3 having the amino acid sequence of SEQ ID NO: 51 (according to the IMGT definition system), a CDR-L1 having the amino acid sequence of SEQ ID NO: 52 (according to the IMGT definition system), a CDR-L2 having the amino acid sequence of SEQ ID NO: 29 (according to the IMGT definition system), and a CDR-L3 having the amino acid sequence of SEQ ID NO: 53 (according to the IMGT definition system).

[0192] In some embodiments, anti-TfR antibody of the present disclosure comprises a CDR-H1, a CDR-H2, and a CDR-H3, which collectively contains no more than 5 amino acid variations (e.g., no more than 5, 4, 3, 2, or 1 amino acid variation) as compared with the CDR-H1 having the amino acid sequence of SEQ ID NO: 49, CDR-H2 having the amino acid sequence of SEQ ID NO: 50, and CDR-H3 having the amino acid sequence of SEQ ID NO: 51. Alternatively or in addition (e.g., in addition), the anti-TfR antibody of the present disclosure comprises a CDR-L1, a CDR-L2, and a CDR-L3, which collectively contains no more than 5 amino acid variations (e.g., no more than 5, 4, 3, 2 or 1 amino acid variation) as compared with the CDR-L1 having the amino acid sequence of SEQ ID NO: 52, CDR-L2 having the amino acid sequence of SEQ ID NO: 29, and CDR-L3 having the amino acid sequence of SEQ ID NO: 53.

[0193] In some embodiments, the anti-TfR antibody of the present disclosure comprises a CDR-H1, a CDR-H2, and a CDR-H3 that collectively are at least 75% (e.g., 75%, 80%, 85%, 90%, 95%, 98%, or 99%) identical to the CDR-H1 having the amino acid sequence of SEQ ID NO: 49, CDR-H2 having the amino acid sequence of SEQ ID NO: 50, and CDR-H3 having the amino acid sequence of SEQ ID NO: 51. Alternatively or in addition (e.g., in addition), the anti-TfR antibody of the present disclosure comprises a CDR-L1, a CDR-L2, and a CDR-L3 that collectively are at least 75% (e.g., 75%, 80%, 85%, 90%, 95%, 98%, or 99%) identical to the to the CDR-L1 having the amino acid sequence of SEQ ID NO: 52, CDR-L2 having the amino acid sequence of SEQ ID NO: 29, and CDR-L3 having the amino acid sequence of SEQ ID NO: 53.

[0194] In some embodiments, the anti-TfR antibody of the present disclosure comprises: a CDR-H1 having no more than 3 amino acid variations (e.g., no more than 3, 2, or 1 amino acid variation) as compared with the CDR-H1 having the amino acid sequence of SEQ ID NO: 49; a CDR-H2 having no more than 3 amino acid variations (e.g., no more than 3, 2, or 1 amino acid variation) as compared with the CDR-H2 having the amino acid sequence of SEQ ID NO: 50; and/or (e.g., and) a CDR-H3 having no more than 3 amino acid variations (e.g., no more than 3, 2, or 1 amino acid variation) as compared with the CDR-H3 having the amino acid sequence of SEQ ID NO: 51. Alternatively or in addition (e.g., in addition), the anti-TfR antibody of the present disclosure comprises: a CDR-L1 having no more than 3 amino acid variations (e.g., no more than 3, 2, or 1 amino acid variation) as compared with the CDR-L1 having the amino acid sequence of SEQ ID NO: 52; a CDR-L2 having no more than 3 amino acid variations (e.g., no more than 3, 2, or 1 amino acid variation) as compared with the CDR-L2 having the amino acid sequence of SEQ ID NO: 29; and/or (e.g., and) a CDR-L3 having no more than 3 amino acid variations (e.g., no more than 3, 2, or 1 amino acid variation) as compared with the CDR-L3 having the amino acid sequence of SEQ ID NO: 53.

[0195] In some embodiments, the anti-TfR antibody of the present disclosure comprises a VH comprising the amino acid sequence of SEQ ID NO: 54. Alternatively or in addition (e.g., in addition), the anti-TfR antibody of the present disclosure comprises a VL comprising the amino acid sequence of SEQ ID NO: 55.

[0196] In some embodiments, the anti-TfR antibody of the present disclosure comprises a VH containing no more than 25 amino acid variations (e.g., no more than 25, 24, 23, 22, 21, 20, 19, 18, 17, 16, 15, 14, 13, 12, 11, 10, 9, 8, 7, 6, 5, 4, 3, 2, or 1 amino acid variation)no more than 25 amino acid variations (e.g., no more than 25, 24, 23, 22, 21, 20, 19, 18, 17, 16, 15, 14, 13, 12, 11, 10, 9, 8, 7, 6, 5, 4, 3, 2, or 1 amino acid variation) as compared with the VH as set forth in SEQ ID NO: 54. Alternatively or in addition (e.g., in addition), the anti-TfR antibody of the present disclosure comprises a VL containing no more than 25 amino acid variations (e.g., no more than 25, 24, 23, 22, 21, 20, 19, 18, 17, 16, 15, 14, 13, 12, 11, 10, 9, 8, 7, 6, 5, 4, 3, 2, or 1 amino acid variation) as compared with the VL as set forth in SEQ ID NO: 55.

[0197] In some embodiments, the anti-TfR antibody of the present disclosure comprises a VH comprising an amino acid sequence that is at least 75% (e.g., 75%, 80%, 85%, 90%, 95%, 98%, or 99%) identical to the VH as set forth in SEQ ID NO: 54. Alternatively orin addition (e.g., in addition), the anti-TfR antibody of the present disclosure comprises a VL comprising an amino acid sequence that is at least 75% (e.g., 75%, 80%, 85%, 90%, 95%, 98%, or 99%) identical to the VL as set forth in SEQ ID NO: 55.

[0198] In some embodiments, the anti-TfR antibody of the present disclosure comprises a CDR-H1, a CDR-H2, and a CDR-H3 of a heavy chain variable domain having the amino acid sequence of SEQ ID NO: 62. Alternatively or in addition (e.g., in addition), the anti-TfR antibody of the present disclosure comprises a CDR-L1, a CDR-L2, and a CDR-L3 of a light chain variable domain having the amino acid sequence of SEQ ID NO: 63.

[0199] In some embodiments, the anti-TfR antibody of the present disclosure comprises a CDR-H1 having the amino acid sequence of SEQ ID NO: 56 (according to the IMGT definition system), a CDR-H2 having the amino acid sequence of SEQ ID NO: 57 (according to the IMGT definition system), a CDR-H3 having the amino acid sequence of SEQ ID NO: 58 (according to the IMGT definition system), a CDR-L1 having the amino acid sequence of SEQ ID NO: 59 (according to the IMGT definition system), a CDR-L2 having the amino acid sequence of SEQ ID NO: 60 (according to the IMGT definition system), and a CDR-L3 having the amino acid sequence of SEQ ID NO: 61 (according to the IMGT definition system).

[0200] In some embodiments, anti-TfR antibody of the present disclosure comprises a CDR-H1, a CDR-H2, and a CDR-H3, which collectively contains no more than 5 amino acid variations (e.g., no more than 5, 4, 3, 2, or 1 amino acid variation) as compared with the CDR-H1 having the amino acid sequence of SEQ ID NO: 56, CDR-H2 having the amino acid sequence of SEQ ID NO: 57, and CDR-H3 having the amino acid sequence of SEQ ID NO: 58. Alternatively or in addition (e.g., in addition), the anti-TfR antibody of the present disclosure comprises a CDR-L1, a CDR-L2, and a CDR-L3, which collectively contains no more than 5 amino acid variations (e.g., no more than 5, 4, 3, 2 or 1 amino acid variation) as compared with the CDR-L1 having the amino acid sequence of SEQ ID NO: 59, CDR-L2 having the amino acid sequence of SEQ ID NO: 60, and CDR-L3 having the amino acid sequence of SEQ ID NO: 61.

[0201] In some embodiments, the anti-TfR antibody of the present disclosure comprises a CDR-H1, a CDR-H2, and a CDR-H3 that collectively are at least 75% (e.g., 75%, 80%, 85%, 90%, 95%, 98%, or 99%) identical to the CDR-H1 having the amino acid sequence of SEQ ID NO: 56, CDR-H2 having the amino acid sequence of SEQ ID NO: 57, and CDR-H3 having the amino acid sequence of SEQ ID NO: 58. Alternatively or in addition (e.g., in addition), the anti-TfR antibody of the present disclosure comprises a CDR-L1, a CDR-L2, and a CDR-L3 that collectively are at least 75% (e.g., 75%, 80%, 85%, 90%, 95%, 98%, or 99%) identical to the to the CDR-L1 having the amino acid sequence of SEQ ID NO: 59, CDR-L2 having the amino acid sequence of SEQ ID NO: 60, and CDR-L3 having the amino acid sequence of SEQ ID NO: 61.

[0202] In some embodiments, the anti-TfR antibody of the present disclosure comprises: a CDR-H1 having no more than 3 amino acid variations (e.g., no more than 3, 2, or 1 amino acid variation) as compared with the CDR-H1 having the amino acid sequence of SEQ ID NO: 56; a CDR-H2 having no more than 3 amino acid variations (e.g., no more than 3, 2, or 1 amino acid variation) as compared with the CDR-H2 having the amino acid sequence of SEQ ID NO: 57; and/or (e.g., and) a CDR-H3 having no more than 3 amino acid variations (e.g., no more than 3, 2, or 1 amino acid variation) as compared with the CDR-H3 having the amino acid sequence of SEQ ID NO: 58. Alternatively or in addition (e.g., in addition), the anti-TfR antibody of the present disclosure comprises: a CDR-L1 having no more than 3 amino acid variations (e.g., no more than 3, 2, or 1 amino acid variation) as compared with the CDR-L1 having the amino acid sequence of SEQ ID NO: 59; a CDR-L2 having no more than 3 amino acid variations (e.g., no more than 3, 2, or 1 amino acid variation) as compared with the CDR-L2 having the amino acid sequence of SEQ ID NO: 60; and/or (e.g., and) a CDR-L3 having no more than 3 amino acid variations (e.g., no more than 3, 2, or 1 amino acid variation) as compared with the CDR-L3 having the amino acid sequence of SEQ ID NO: 61.

[0203] In some embodiments, the anti-TfR antibody of the present disclosure comprises a VH comprising the amino acid sequence of SEQ ID NO: 62. Alternatively or in addition (e.g., in addition), the anti-TfR antibody of the present disclosure comprises a VL comprising the amino acid sequence of SEQ ID NO: 63.

[0204] In some embodiments, the anti-TfR antibody of the present disclosure comprises a VH containing no more than 25 amino acid variations (e.g., no more than 25, 24, 23, 22, 21, 20, 19, 18, 17, 16, 15, 14, 13, 12, 11, 10, 9, 8, 7, 6, 5, 4, 3, 2, or 1 amino acid variation)no more than 25 amino acid variations (e.g., no more than 25, 24, 23, 22, 21, 20, 19, 18, 17, 16, 15, 14, 13, 12, 11, 10, 9, 8, 7, 6, 5, 4, 3, 2, or 1 amino acid variation) as compared with the VH as set forth in SEQ ID NO: 62. Alternatively or in addition (e.g., in addition), the anti-TfR antibody of the present disclosure comprises a VL containing no more than 25 amino acid variations (e.g., no more than 25, 24, 23, 22, 21, 20, 19, 18, 17, 16, 15, 14, 13, 12, 11, 10, 9, 8, 7, 6, 5, 4, 3, 2, or 1 amino acid variation) as compared with the VL as set forth in SEQ ID NO: 63.

[0205] In some embodiments, the anti-TfR antibody of the present disclosure comprises a VH comprising an amino acid sequence that is at least 75% (e.g., 75%, 80%, 85%, 90%, 95%, 98%, or 99%) identical to the VH as set forth in SEQ ID NO: 62. Alternatively or in addition (e.g., in addition), the anti-TfR antibody of the present disclosure comprises a VL comprising an amino acid sequence that is at least 75% (e.g., 75%, 80%, 85%, 90%, 95%, 98%, or 99%) identical to the VL as set forth in SEQ ID NO: 63.

[0206] In some embodiments, the anti-TfR antibody of the present disclosure comprises a CDR-H1, a CDR-H2, and a CDR-H3 of a heavy chain variable domain having the amino acid sequence of SEQ ID NO: 70. Alternatively or in addition (e.g., in addition), the anti-TfR antibody of the present disclosure comprises a CDR-L1, a CDR-L2, and a CDR-L3 of a light chain variable domain having the amino acid sequence of SEQ ID NO: 71.

[0207] In some embodiments, the anti-TfR antibody of the present disclosure comprises a CDR-H1 having the amino acid sequence of SEQ ID NO: 64 (according to the IMGT definition system), a CDR-H2 having the amino acid sequence of SEQ ID NO: 65 (according to the IMGT definition system), a CDR-H3 having the amino acid sequence of SEQ ID NO: 66 (according to the IMGT definition system), a CDR-L1 having the amino acid sequence of SEQ ID NO: 67 (according to the IMGT definition system), a CDR-L2 having the amino acid sequence of SEQ ID NO: 68 (according to the IMGT definition system), and a CDR-L3 having the amino acid sequence of SEQ ID NO: 69 (according to the IMGT definition system).

[0208] In some embodiments, anti-TfR antibody of the present disclosure comprises a CDR-H1, a CDR-H2, and a CDR-H3, which collectively contains no more than 5 amino acid variations (e.g., no more than 5, 4, 3, 2, or 1 amino acid variation) as compared with the CDR-H1 having the amino acid sequence of SEQ ID NO: 64, CDR-H2 having the amino acid sequence of SEQ ID NO: 65, and CDR-H3 having the amino acid sequence of SEQ ID NO: 66. Alternatively or in addition (e.g., in addition), the anti-TfR antibody of the present disclosure comprises a CDR-L1, a CDR-L2, and a CDR-L3, which collectively contains no more than 5 amino acid variations (e.g., no more than 5, 4, 3, 2 or 1 amino acid variation) as compared with the CDR-L1 having the amino acid sequence of SEQ ID NO: 67, CDR-L2 having the amino acid sequence of SEQ ID NO: 68, and CDR-L3 having the amino acid sequence of SEQ ID NO: 69.

[0209] In some embodiments, the anti-TfR antibody of the present disclosure comprises a CDR-H1, a CDR-H2, and a CDR-H3 that collectively are at least 75% (e.g., 75%, 80%, 85%, 90%, 95%, 98%, or 99%) identical to the CDR-H1 having the amino acid sequence of SEQ ID NO: 64, CDR-H2 having the amino acid sequence of SEQ ID NO: 65, and CDR-H3 having the amino acid sequence of SEQ ID NO: 66. Alternatively or in addition (e.g., in addition), the anti-TfR antibody of the present disclosure comprises a CDR-L1, a CDR-L2, and a CDR-L3 that collectively are at least 75% (e.g., 75%, 80%, 85%, 90%, 95%, 98%, or 99%) identical to the to the CDR-L1 having the amino acid sequence of SEQ ID NO: 67, CDR-L2 having the amino acid sequence of SEQ ID NO: 68, and CDR-L3 having the amino acid sequence of SEQ ID NO: 69.

[0210] In some embodiments, the anti-TfR antibody of the present disclosure comprises: a CDR-H1 having no more than 3 amino acid variations (e.g., no more than 3, 2, or 1 amino acid variation) as compared with the CDR-H1 having the amino acid sequence of SEQ ID NO: 64; a CDR-H2 having no more than 3 amino acid variations (e.g., no more than 3, 2, or 1 amino acid variation) as compared with the CDR-H2 having the amino acid sequence of SEQ ID NO: 65; and/or (e.g., and) a CDR-H3 having no more than 3 amino acid variations (e.g., no more than 3, 2, or 1 amino acid variation) as compared with the CDR-H3 having the amino acid sequence of SEQ ID NO: 66. Alternatively or in addition (e.g., in addition), the anti-TfR antibody of the present disclosure comprises: a CDR-L1 having no more than 3 amino acid variations (e.g., no more than 3, 2, or 1 amino acid variation) as compared with the CDR-L1 having the amino acid sequence of SEQ ID NO: 67; a CDR-L2 having no more than 3 amino acid variations (e.g., no more than 3, 2, or 1 amino acid variation) as compared with the CDR-L2 having the amino acid sequence of SEQ ID NO: 68; and/or (e.g., and) a CDR-L3 having no more than 3 amino acid variations (e.g., no more than 3, 2, or 1 amino acid variation) as compared with the CDR-L3 having the amino acid sequence of SEQ ID NO: 69.

[0211] In some embodiments, the anti-TfR antibody of the present disclosure comprises a VH comprising the amino acid sequence of SEQ ID NO: 70. Alternatively or in addition (e.g., in addition), the anti-TfR antibody of the present disclosure comprises a VL comprising the amino acid sequence of SEQ ID NO: 71.

[0212] In some embodiments, the anti-TfR antibody of the present disclosure comprises a VH containing no more than 25 amino acid variations (e.g., no more than 25, 24, 23, 22, 21, 20, 19, 18, 17, 16, 15, 14, 13, 12, 11, 10, 9, 8, 7, 6, 5, 4, 3, 2, or 1 amino acid variation)no more than 25 amino acid variations (e.g., no more than 25, 24, 23, 22, 21, 20, 19, 18, 17, 16, 15, 14, 13, 12, 11, 10, 9, 8, 7, 6, 5, 4, 3, 2, or 1 amino acid variation) as compared with the VH as set forth in SEQ ID NO: 70. Alternatively or in addition (e.g., in addition), the anti-TfR antibody of the present disclosure comprises a VL containing no more than 25 amino acid variations (e.g., no more than 25, 24, 23, 22, 21, 20, 19, 18, 17, 16, 15, 14, 13, 12, 11, 10, 9, 8, 7, 6, 5, 4, 3, 2, or 1 amino acid variation) as compared with the VL as set forth in SEQ ID NO: 71.

[0213] In some embodiments, the anti-TfR antibody of the present disclosure comprises a VH comprising an amino acid sequence that is at least 75% (e.g., 75%, 80%, 85%, 90%, 95%, 98%, or 99%) identical to the VH as set forth in SEQ ID NO: 70. Alternatively or in addition (e.g., in addition), the anti-TfR antibody of the present disclosure comprises a VL comprising an amino acid sequence that is at least 75% (e.g., 75%, 80%, 85%, 90%, 95%, 98%, or 99%) identical to the VL as set forth in SEQ ID NO: 71.

[0214] In some embodiments, the anti-TfR antibody of the present disclosure comprises a CDR-H1, a CDR-H2, and a CDR-H3 of a heavy chain variable domain having the amino acid sequence of SEQ ID NO: 77. Alternatively or in addition (e.g., in addition), the anti-TfR antibody of the present disclosure comprises a CDR-L1, a CDR-L2, and a CDR-L3 of a light chain variable domain having the amino acid sequence of SEQ ID NO: 78.

[0215] In some embodiments, the anti-TfR antibody of the present disclosure comprises a CDR-H1 having the amino acid sequence of SEQ ID NO: 72 (according to the IMGT definition system), a CDR-H2 having the amino acid sequence of SEQ ID NO: 73 (according to the IMGT definition system), a CDR-H3 having the amino acid sequence of SEQ ID NO: 74 (according to the IMGT definition system), a CDR-L1 having the amino acid sequence of SEQ ID NO: 75 (according to the IMGT definition system), a CDR-L2 having the amino acid sequence of SEQ ID NO: 45 (according to the IMGT definition system), and a CDR-L3 having the amino acid sequence of SEQ ID NO: 76 (according to the IMGT definition system).

[0216] In some embodiments, anti-TfR antibody of the present disclosure comprises a CDR-H1, a CDR-H2, and a CDR-H3, which collectively contains no more than 5 amino acid variations (e.g., no more than 5, 4, 3, 2, or 1 amino acid variation) as compared with the CDR-H1 having the amino acid sequence of SEQ ID NO: 72, CDR-H2 having the amino acid sequence of SEQ ID NO: 73, and CDR-H3 having the amino acid sequence of SEQ ID NO: 74. Alternatively or in addition (e.g., in addition), the anti-TfR antibody of the present disclosure comprises a CDR-L1, a CDR-L2, and a CDR-L3, which collectively contains no more than 5 amino acid variations (e.g., no more than 5, 4, 3, 2 or 1 amino acid variation) as compared with the CDR-L1 having the amino acid sequence of SEQ ID NO: 75, CDR-L2 having the amino acid sequence of SEQ ID NO: 45, and CDR-L3 having the amino acid sequence of SEQ ID NO: 76.

[0217] In some embodiments, the anti-TfR antibody of the present disclosure comprises a CDR-H1, a CDR-H2, and a CDR-H3 that collectively are at least 75% (e.g., 75%, 80%, 85%, 90%, 95%, 98%, or 99%) identical to the CDR-H1 having the amino acid sequence of SEQ ID NO: 72, CDR-H2 having the amino acid sequence of SEQ ID NO: 73, and CDR-H3 having the amino acid sequence of SEQ ID NO: 74. Alternatively or in addition (e.g., in addition), the anti-TfR antibody of the present disclosure comprises a CDR-L1, a CDR-L2, and a CDR-L3 that collectively are at least 75% (e.g., 75%, 80%, 85%, 90%, 95%, 98%, or 99%) identical to the to the CDR-L1 having the amino acid sequence of SEQ ID NO: 75, CDR-L2 having the amino acid sequence of SEQ ID NO: 45, and CDR-L3 having the amino acid sequence of SEQ ID NO: 76.

[0218] In some embodiments, the anti-TfR antibody of the present disclosure comprises: a CDR-H1 having no more than 3 amino acid variations (e.g., no more than 3, 2, or 1 amino acid variation) as compared with the CDR-H1 having the amino acid sequence of SEQ ID NO: 72; a CDR-H2 having no more than 3 amino acid variations (e.g., no more than 3, 2, or 1 amino acid variation) as compared with the CDR-H2 having the amino acid sequence of SEQ ID NO: 73; and/or (e.g., and) a CDR-H3 having no more than 3 amino acid variations (e.g., no more than 3, 2, or 1 amino acid variation) as compared with the CDR-H3 having the amino acid sequence of SEQ ID NO: 74. Alternatively or in addition (e.g., in addition), the anti-TfR antibody of the present disclosure comprises: a CDR-L1 having no more than 3 amino acid variations (e.g., no more than 3, 2, or 1 amino acid variation) as compared with the CDR-L1 having the amino acid sequence of SEQ ID NO: 75; a CDR-L2 having no more than 3 amino acid variations (e.g., no more than 3, 2, or 1 amino acid variation) as compared with the CDR-L2 having the amino acid sequence of SEQ ID NO: 45; and/or (e.g., and) a CDR-L3 having no more than 3 amino acid variations (e.g., no more than 3, 2, or 1 amino acid variation) as compared with the CDR-L3 having the amino acid sequence of SEQ ID NO: 76.

[0219] In some embodiments, the anti-TfR antibody of the present disclosure comprises a VH comprising the amino acid sequence of SEQ ID NO: 77. Alternatively or in addition (e.g., in addition), the anti-TfR antibody of the present disclosure comprises a VL comprising the amino acid sequence of SEQ ID NO: 78.

[0220] In some embodiments, the anti-TfR antibody of the present disclosure comprises a VH containing no more than 25 amino acid variations (e.g., no more than 25, 24, 23, 22, 21, 20, 19, 18, 17, 16, 15, 14, 13, 12, 11, 10, 9, 8, 7, 6, 5, 4, 3, 2, or 1 amino acid variation)no more than 25 amino acid variations (e.g., no more than 25, 24, 23, 22, 21, 20, 19, 18, 17, 16, 15, 14, 13, 12, 11, 10, 9, 8, 7, 6, 5, 4, 3, 2, or 1 amino acid variation) as compared with the VH as set forth in SEQ ID NO: 77. Alternatively or in addition (e.g., in addition), the anti-TfR antibody of the present disclosure comprises a VL containing no more than 25 amino acid variations (e.g., no more than 25, 24, 23, 22, 21, 20, 19, 18, 17, 16, 15, 14, 13, 12, 11, 10, 9, 8, 7, 6, 5, 4, 3, 2, or 1 amino acid variation) as compared with the VL as set forth in SEQ ID NO: 78.

[0221] n some embodiments, the anti-TfR antibody of the present disclosure comprises a VH comprising an amino acid sequence that is at least 75% (e.g., 75%, 80%, 85%, 90%, 95%, 98%, or 99%) identical to the VH as set forth in SEQ ID NO: 77. Alternatively or in addition (e.g., in addition), the anti-TfR antibody of the present disclosure comprises a VL comprising an amino acid sequence that is at least 75% (e.g., 75%, 80%, 85%, 90%, 95%, 98%, or 99%) identical to the VL as set forth in SEQ ID NO: 78.

[0222] In some embodiments, the anti-TfR antibody of the present disclosure comprises a CDR-H1, a CDR-H2, and a CDR-H3 of a heavy chain variable domain having the amino acid sequence of SEQ ID NO: 85. Alternatively or in addition (e.g., in addition), the anti-TfR antibody of the present disclosure comprises a CDR-L1, a CDR-L2, and a CDR-L3 of a light chain variable domain having the amino acid sequence of SEQ ID NO: 86.

[0223] In some embodiments, the anti-TfR antibody of the present disclosure comprises a CDR-H1 having the amino acid sequence of SEQ ID NO: 79 (according to the IMGT definition system), a CDR-H2 having the amino acid sequence of SEQ ID NO: 80 (according to the IMGT definition system), a CDR-H3 having the amino acid sequence of SEQ ID NO: 81 (according to the IMGT definition system), a CDR-L1 having the amino acid sequence of SEQ ID NO: 82 (according to the IMGT definition system), a CDR-L2 having the amino acid sequence of SEQ ID NO: 83 (according to the IMGT definition system), and a CDR-L3 having the amino acid sequence of SEQ ID NO: 84 (according to the IMGT definition system).

[0224] In some embodiments, anti-TfR antibody of the present disclosure comprises a CDR-H1, a CDR-H2, and a CDR-H3, which collectively contains no more than 5 amino acid variations (e.g., no more than 5, 4, 3, 2, or 1 amino acid variation) as compared with the CDR-H1 having the amino acid sequence of SEQ ID NO: 79, CDR-H2 having the amino acid sequence of SEQ ID NO: 80, and CDR-H3 having the amino acid sequence of SEQ ID NO: 81. Alternatively or in addition (e.g., in addition), the anti-TfR antibody of the present disclosure comprises a CDR-L1, a CDR-L2, and a CDR-L3, which collectively contains no more than 5 amino acid variations (e.g., no more than 5, 4, 3, 2 or 1 amino acid variation) as compared with the CDR-L1 having the amino acid sequence of SEQ ID NO: 82, CDR-L2 having the amino acid sequence of SEQ ID NO: 83, and CDR-L3 having the amino acid sequence of SEQ ID NO: 84.

[0225] In some embodiments, the anti-TfR antibody of the present disclosure comprises a CDR-H1, a CDR-H2, and a CDR-H3 that collectively are at least 75% (e.g., 75%, 80%, 85%, 90%, 95%, 98%, or 99%) identical to the CDR-H1 having the amino acid sequence of SEQ ID NO: 79, CDR-H2 having the amino acid sequence of SEQ ID NO: 80, and CDR-H3 having the amino acid sequence of SEQ ID NO: 81. Alternatively or in addition (e.g., in addition), the anti-TfR antibody of the present disclosure comprises a CDR-L1, a CDR-L2, and a CDR-L3 that collectively are at least 75% (e.g., 75%, 80%, 85%, 90%, 95%, 98%, or 99%) identical to the to the CDR-L1 having the amino acid sequence of SEQ ID NO: 82, CDR-L2 having the amino acid sequence of SEQ ID NO: 83, and CDR-L3 having the amino acid sequence of SEQ ID NO: 84.

[0226] In some embodiments, the anti-TfR antibody of the present disclosure comprises: a CDR-H1 having no more than 3 amino acid variations (e.g., no more than 3, 2, or 1 amino acid variation) as compared with the CDR-H1 having the amino acid sequence of SEQ ID NO: 79; a CDR-H2 having no more than 3 amino acid variations (e.g., no more than 3, 2, or 1 amino acid variation) as compared with the CDR-H2 having the amino acid sequence of SEQ ID NO: 80; and/or (e.g., and) a CDR-H3 having no more than 3 amino acid variations (e.g., no more than 3, 2, or 1 amino acid variation) as compared with the CDR-H3 having the amino acid sequence of SEQ ID NO: 81. Alternatively or in addition (e.g., in addition), the anti-TfR antibody of the present disclosure comprises: a CDR-L1 having no more than 3 amino acid variations (e.g., no more than 3, 2, or 1 amino acid variation) as compared with the CDR-L1 having the amino acid sequence of SEQ ID NO: 82; a CDR-L2 having no more than 3 amino acid variations (e.g., no more than 3, 2, or 1 amino acid variation) as compared with the CDR-L2 having the amino acid sequence of SEQ ID NO: 83; and/or (e.g., and) a CDR-L3 having no more than 3 amino acid variations (e.g., no more than 3, 2, or 1 amino acid variation) as compared with the CDR-L3 having the amino acid sequence of SEQ ID NO: 84.

[0227] In some embodiments, the anti-TfR antibody of the present disclosure comprises a VH comprising the amino acid sequence of SEQ ID NO: 85. Alternatively or in addition (e.g., in addition), the anti-TfR antibody of the present disclosure comprises a VL comprising the amino acid sequence of SEQ ID NO: 86.

[0228] In some embodiments, the anti-TfR antibody of the present disclosure comprises a VH containing no more than 25 amino acid variations (e.g., no more than 25, 24, 23, 22, 21, 20, 19, 18, 17, 16, 15, 14, 13, 12, 11, 10, 9, 8, 7, 6, 5, 4, 3, 2, or 1 amino acid variation)no more than 25 amino acid variations (e.g., no more than 25, 24, 23, 22, 21, 20, 19, 18, 17, 16, 15, 14, 13, 12, 11, 10, 9, 8, 7, 6, 5, 4, 3, 2, or 1 amino acid variation) as compared with the VH as set forth in SEQ ID NO: 85. Alternatively or in addition (e.g., in addition), the anti-TfR antibody of the present disclosure comprises a VL containing no more than 25 amino acid variations (e.g., no more than 25, 24, 23, 22, 21, 20, 19, 18, 17, 16, 15, 14, 13, 12, 11, 10, 9, 8, 7, 6, 5, 4, 3, 2, or 1 amino acid variation) as compared with the VL as set forth in SEQ ID NO: 86.

[0229] In some embodiments, the anti-TfR antibody of the present disclosure comprises a VH comprising an amino acid sequence that is at least 75% (e.g., 75%, 80%, 85%, 90%, 95%, 98%, or 99%) identical to the VH as set forth in SEQ ID NO: 85. Alternatively or in addition (e.g., in addition), the anti-TfR antibody of the present disclosure comprises a VL comprising an amino acid sequence that is at least 75% (e.g., 75%, 80%, 85%, 90%, 95%, 98%, or 99%) identical to the VL as set forth in SEQ ID NO: 86.

[0230] In some embodiments, the anti-TfR antibody of the present disclosure comprises a CDR-H1, a CDR-H2, and a CDR-H3 of a heavy chain variable domain having the amino acid sequence of SEQ ID NO: 89. Alternatively or in addition (e.g., in addition), the anti-TfR antibody of the present disclosure comprises a CDR-L1, a CDR-L2, and a CDR-L3 of a light chain variable domain having the amino acid sequence of SEQ ID NO: 90.

[0231] In some embodiments, the anti-TfR antibody of the present disclosure comprises a CDR-H1 having the amino acid sequence of SEQ ID NO: 72 (according to the IMGT definition system), a CDR-H2 having the amino acid sequence of SEQ ID NO: 87 (according to the IMGT definition system), a CDR-H3 having the amino acid sequence of SEQ ID NO: 74 (according to the IMGT definition system), a CDR-L1 having the amino acid sequence of SEQ ID NO: 75 (according to the IMGT definition system), a CDR-L2 having the amino acid sequence of SEQ ID NO: 45 (according to the IMGT definition system), and a CDR-L3 having the amino acid sequence of SEQ ID NO: 88 (according to the IMGT definition system).

[0232] In some embodiments, anti-TfR antibody of the present disclosure comprises a CDR-H1, a CDR-H2, and a CDR-H3, which collectively contains no more than 5 amino acid variations (e.g., no more than 5, 4, 3, 2, or 1 amino acid variation) as compared with the CDR-H1 having the amino acid sequence of SEQ ID NO: 72, CDR-H2 having the amino acid sequence of SEQ ID NO: 87, and CDR-H3 having the amino acid sequence of SEQ ID NO: 74. Alternatively or in addition (e.g., in addition), the anti-TfR antibody of the present disclosure comprises a CDR-L1, a CDR-L2, and a CDR-L3, which collectively contains no more than 5 amino acid variations (e.g., no more than 5, 4, 3, 2 or 1 amino acid variation) as compared with the CDR-L1 having the amino acid sequence of SEQ ID NO: 75, CDR-L2 having the amino acid sequence of SEQ ID NO: 45, and CDR-L3 having the amino acid sequence of SEQ ID NO: 88.

[0233] In some embodiments, the anti-TfR antibody of the present disclosure comprises a CDR-H1, a CDR-H2, and a CDR-H3 that collectively are at least 75% (e.g., 75%, 80%, 85%, 90%, 95%, 98%, or 99%) identical to the CDR-H1 having the amino acid sequence of SEQ ID NO: 72, CDR-H2 having the amino acid sequence of SEQ ID NO: 87, and CDR-H3 having the amino acid sequence of SEQ ID NO: 74. Alternatively or in addition (e.g., in addition), the anti-TfR antibody of the present disclosure comprises a CDR-L1, a CDR-L2, and a CDR-L3 that collectively are at least 75% (e.g., 75%, 80%, 85%, 90%, 95%, 98%, or 99%) identical to the to the CDR-L1 having the amino acid sequence of SEQ ID NO: 75, CDR-L2 having the amino acid sequence of SEQ ID NO: 45, and CDR-L3 having the amino acid sequence of SEQ ID NO: 88.

[0234] In some embodiments, the anti-TfR antibody of the present disclosure comprises: a CDR-H1 having no more than 3 amino acid variations (e.g., no more than 3, 2, or 1 amino acid variation) as compared with the CDR-H1 having the amino acid sequence of SEQ ID NO: 72; a CDR-H2 having no more than 3 amino acid variations (e.g., no more than 3, 2, or 1 amino acid variation) as compared with the CDR-H2 having the amino acid sequence of SEQ ID NO: 87; and/or (e.g., and) a CDR-H3 having no more than 3 amino acid variations (e.g., no more than 3, 2, or 1 amino acid variation) as compared with the CDR-H3 having the amino acid sequence of SEQ ID NO: 74. Alternatively or in addition (e.g., in addition), the anti-TfR antibody of the present disclosure comprises: a CDR-L1 having no more than 3 amino acid variations (e.g., no more than 3, 2, or 1 amino acid variation) as compared with the CDR-L1 having the amino acid sequence of SEQ ID NO: 75; a CDR-L2 having no more than 3 amino acid variations (e.g., no more than 3, 2, or 1 amino acid variation) as compared with the CDR-L2 having the amino acid sequence of SEQ ID NO: 45; and/or (e.g., and) a CDR-L3 having no more than 3 amino acid variations (e.g., no more than 3, 2, or 1 amino acid variation) as compared with the CDR-L3 having the amino acid sequence of SEQ ID NO: 88.

[0235] In some embodiments, the anti-TfR antibody of the present disclosure comprises a VH comprising the amino acid sequence of SEQ ID NO: 89. Alternatively or in addition (e.g., in addition), the anti-TfR antibody of the present disclosure comprises a VL comprising the amino acid sequence of SEQ ID NO: 90.

[0236] In some embodiments, the anti-TfR antibody of the present disclosure comprises a VH containing no more than 25 amino acid variations (e.g., no more than 25, 24, 23, 22, 21, 20, 19, 18, 17, 16, 15, 14, 13, 12, 11, 10, 9, 8, 7, 6, 5, 4, 3, 2, or 1 amino acid variation)no more than 25 amino acid variations (e.g., no more than 25, 24, 23, 22, 21, 20, 19, 18, 17, 16, 15, 14, 13, 12, 11, 10, 9, 8, 7, 6, 5, 4, 3, 2, or 1 amino acid variation) as compared with the VH as set forth in SEQ ID NO: 89. Alternatively or in addition (e.g., in addition), the anti-TfR antibody of the present disclosure comprises a VL containing no more than 25 amino acid variations (e.g., no more than 25, 24, 23, 22, 21, 20, 19, 18, 17, 16, 15, 14, 13, 12, 11, 10, 9, 8, 7, 6, 5, 4, 3, 2, or 1 amino acid variation) as compared with the VL as set forth in SEQ ID NO: 90.

[0237] In some embodiments, the anti-TfR antibody of the present disclosure comprises a VH comprising an amino acid sequence that is at least 75% (e.g., 75%, 80%, 85%, 90%, 95%, 98%, or 99%) identical to the VH as set forth in SEQ ID NO: 89. Alternatively or in addition (e.g., in addition), the anti-TfR antibody of the present disclosure comprises a VL comprising an amino acid sequence that is at least 75% (e.g., 75%, 80%, 85%, 90%, 95%, 98%, or 99%) identical to the VL as set forth in SEQ ID NO: 90.

[0238] In some embodiments, the anti-TfR antibody of the present disclosure comprises a CDR-H1, a CDR-H2, and a CDR-H3 of a heavy chain variable domain having the amino acid sequence of SEQ ID NO: 97. Alternatively or in addition (e.g., in addition), the anti-TfR antibody of the present disclosure comprises a CDR-L1, a CDR-L2, and a CDR-L3 of a light chain variable domain having the amino acid sequence of SEQ ID NO: 98.

[0239] In some embodiments, the anti-TfR antibody of the present disclosure comprises a CDR-H1 having the amino acid sequence of SEQ ID NO: 91 (according to the IMGT definition system), a CDR-H2 having the amino acid sequence of SEQ ID NO: 92 (according to the IMGT definition system), a CDR-H3 having the amino acid sequence of SEQ ID NO: 93 (according to the IMGT definition system), a CDR-L1 having the amino acid sequence of SEQ ID NO: 94 (according to the IMGT definition system), a CDR-L2 having the amino acid sequence of SEQ ID NO: 95 (according to the IMGT definition system), and a CDR-L3 having the amino acid sequence of SEQ ID NO: 96 (according to the IMGT definition system).

[0240] In some embodiments, anti-TfR antibody of the present disclosure comprises a CDR-H1, a CDR-H2, and a CDR-H3, which collectively contains no more than 5 amino acid variations (e.g., no more than 5, 4, 3, 2, or 1 amino acid variation) as compared with the CDR-H1 having the amino acid sequence of SEQ ID NO: 91, CDR-H2 having the amino acid sequence of SEQ ID NO: 92, and CDR-H3 having the amino acid sequence of SEQ ID NO: 93. Alternatively or in addition (e.g., in addition), the anti-TfR antibody of the present disclosure comprises a CDR-L1, a CDR-L2, and a CDR-L3, which collectively contains no more than 5 amino acid variations (e.g., no more than 5, 4, 3, 2 or 1 amino acid variation) as compared with the CDR-L1 having the amino acid sequence of SEQ ID NO: 94, CDR-L2 having the amino acid sequence of SEQ ID NO: 95, and CDR-L3 having the amino acid sequence of SEQ ID NO: 96.

[0241] In some embodiments, the anti-TfR antibody of the present disclosure comprises a CDR-H1, a CDR-H2, and a CDR-H3 that collectively are at least 75% (e.g., 75%, 80%, 85%, 90%, 95%, 98%, or 99%) identical to the CDR-H1 having the amino acid sequence of SEQ ID NO: 91, CDR-H2 having the amino acid sequence of SEQ ID NO: 92, and CDR-H3 having the amino acid sequence of SEQ ID NO: 93. Alternatively or in addition (e.g., in addition), the anti-TfR antibody of the present disclosure comprises a CDR-L1, a CDR-L2, and a CDR-L3 that collectively are at least 75% (e.g., 75%, 80%, 85%, 90%, 95%, 98%, or 99%) identical to the to the CDR-L1 having the amino acid sequence of SEQ ID NO: 94, CDR-L2 having the amino acid sequence of SEQ ID NO: 95, and CDR-L3 having the amino acid sequence of SEQ ID NO: 96.

[0242] In some embodiments, the anti-TfR antibody of the present disclosure comprises: a CDR-H1 having no more than 3 amino acid variations (e.g., no more than 3, 2, or 1 amino acid variation) as compared with the CDR-H1 having the amino acid sequence of SEQ ID NO: 91; a CDR-H2 having no more than 3 amino acid variations (e.g., no more than 3, 2, or 1 amino acid variation) as compared with the CDR-H2 having the amino acid sequence of SEQ ID NO: 92; and/or (e.g., and) a CDR-H3 having no more than 3 amino acid variations (e.g., no more than 3, 2, or 1 amino acid variation) as compared with the CDR-H3 having the amino acid sequence of SEQ ID NO: 93. Alternatively or in addition (e.g., in addition), the anti-TfR antibody of the present disclosure comprises: a CDR-L1 having no more than 3 amino acid variations (e.g., no more than 3, 2, or 1 amino acid variation) as compared with the CDR-L1 having the amino acid sequence of SEQ ID NO: 94; a CDR-L2 having no more than 3 amino acid variations (e.g., no more than 3, 2, or 1 amino acid variation) as compared with the CDR-L2 having the amino acid sequence of SEQ ID NO: 95; and/or (e.g., and) a CDR-L3 having no more than 3 amino acid variations (e.g., no more than 3, 2, or 1 amino acid variation) as compared with the CDR-L3 having the amino acid sequence of SEQ ID NO: 96.

[0243] In some embodiments, the anti-TfR antibody of the present disclosure comprises a VH comprising the amino acid sequence of SEQ ID NO: 97. Alternatively or in addition (e.g., in addition), the anti-TfR antibody of the present disclosure comprises a VL comprising the amino acid sequence of SEQ ID NO: 98.

[0244] In some embodiments, the anti-TfR antibody of the present disclosure comprises a VH containing no more than 25 amino acid variations (e.g., no more than 25, 24, 23, 22, 21, 20, 19, 18, 17, 16, 15, 14, 13, 12, 11, 10, 9, 8, 7, 6, 5, 4, 3, 2, or 1 amino acid variation) as compared with the VH as set forth in SEQ ID NO: 97. Alternatively or in addition (e.g., in addition), the anti-TfR antibody of the present disclosure comprises a VL containing no more than 25 amino acid variations (e.g., no more than 25, 24, 23, 22, 21, 20, 19, 18, 17, 16, 15, 14, 13, 12, 11, 10, 9, 8, 7, 6, 5, 4, 3, 2, or 1 amino acid variation) as compared with the VL as set forth in SEQ ID NO: 98.

[0245] In some embodiments, the anti-TfR antibody of the present disclosure comprises a VH comprising an amino acid sequence that is at least 75% (e.g., 75%, 80%, 85%, 90%, 95%, 98%, or 99%) identical to the VH as set forth in SEQ ID NO: 97. Alternatively or in addition (e.g., in addition), the anti-TfR antibody of the present disclosure comprises a VL comprising an amino acid sequence that is at least 75% (e.g., 75%, 80%, 85%, 90%, 95%, 98%, or 99%) identical to the VL as set forth in SEQ ID NO: 98.

[0246] In some embodiments, the anti-TfR antibody of the present disclosure comprises a CDR-H1, a CDR-H2, and a CDR-H3 of a heavy chain variable domain having the amino acid sequence of SEQ ID NO: 104. Alternatively or in addition (e.g., in addition), the anti-TfR antibody of the present disclosure comprises a CDR-L1, a CDR-L2, and a CDR-L3 of a light chain variable domain having the amino acid sequence of SEQ ID NO: 105.

[0247] In some embodiments, anti-TfR antibody of the present disclosure comprises a CDR-H1, a CDR-H2, and a CDR-H3, which collectively contains no more than 5 amino acid variations (e.g., no more than 5, 4, 3, 2, or 1 amino acid variation) as compared with the CDR-H1 having the amino acid sequence of SEQ ID NO: 99, CDR-H2 having the amino acid sequence of SEQ ID NO: 100, and CDR-H3 having the amino acid sequence of SEQ ID NO: 101. Alternatively or in addition (e.g., in addition), the anti-TfR antibody of the present disclosure comprises a CDR-L1, a CDR-L2, and a CDR-L3, which collectively contains no more than 5 amino acid variations (e.g., no more than 5, 4, 3, 2 or 1 amino acid variation) as compared with the CDR-L1 having the amino acid sequence of SEQ ID NO: 102, CDR-L2 having the amino acid sequence of SEQ ID NO: 60, and CDR-L3 having the amino acid sequence of SEQ ID NO: 103.

[0248] In some embodiments, the anti-TfR antibody of the present disclosure comprises a CDR-H1, a CDR-H2, and a CDR-H3 that collectively are at least 75% (e.g., 75%, 80%, 85%, 90%, 95%, 98%, or 99%) identical to the CDR-H1 having the amino acid sequence of SEQ ID NO: 99, CDR-H2 having the amino acid sequence of SEQ ID NO: 100, and CDR-H3 having the amino acid sequence of SEQ ID NO: 101. Alternatively or in addition (e.g., in addition), the anti-TfR antibody of the present disclosure comprises a CDR-L1, a CDR-L2, and a CDR-L3 that collectively are at least 75% (e.g., 75%, 80%, 85%, 90%, 95%, 98%, or 99%) identical to the to the CDR-L1 having the amino acid sequence of SEQ ID NO: 102, CDR-L2 having the amino acid sequence of SEQ ID NO: 60, and CDR-L3 having the amino acid sequence of SEQ ID NO: 103.

[0249] In some embodiments, the anti-TfR antibody of the present disclosure comprises: a CDR-H1 having no more than 3 amino acid variations (e.g., no more than 3, 2, or 1 amino acid variation) as compared with the CDR-H1 having the amino acid sequence of SEQ ID NO: 99; a CDR-H2 having no more than 3 amino acid variations (e.g., no more than 3, 2, or 1 amino acid variation) as compared with the CDR-H2 having the amino acid sequence of SEQ ID NO: 100; and/or (e.g., and) a CDR-H3 having no more than 3 amino acid variations (e.g., no more than 3, 2, or 1 amino acid variation) as compared with the CDR-H3 having the amino acid sequence of SEQ ID NO: 101. Alternatively or in addition (e.g., in addition), the anti-TfR antibody of the present disclosure comprises: a CDR-L1 having no more than 3 amino acid variations (e.g., no more than 3, 2, or 1 amino acid variation) as compared with the CDR-L1 having the amino acid sequence of SEQ ID NO: 102; a CDR-L2 having no more than 3 amino acid variations (e.g., no more than 3, 2, or 1 amino acid variation) as compared with the CDR-L2 having the amino acid sequence of SEQ ID NO: 60; and/or (e.g., and) a CDR-L3 having no more than 3 amino acid variations (e.g., no more than 3, 2, or 1 amino acid variation) as compared with the CDR-L3 having the amino acid sequence of SEQ ID NO: 103.

[0250] In some embodiments, the anti-TfR antibody of the present disclosure comprises a VH comprising the amino acid sequence of SEQ ID NO: 104. Alternatively or in addition (e.g., in addition), the anti-TfR antibody of the present disclosure comprises a VL comprising the amino acid sequence of SEQ ID NO: 105.

[0251] In some embodiments, the anti-TfR antibody of the present disclosure comprises a VH containing no more than 25 amino acid variations (e.g., no more than 25, 24, 23, 22, 21, 20, 19, 18, 17, 16, 15, 14, 13, 12, 11, 10, 9, 8, 7, 6, 5, 4, 3, 2, or 1 amino acid variation) as compared with the VH as set forth in SEQ ID NO: 104. Alternatively or in addition (e.g., in addition), the anti-TfR antibody of the present disclosure comprises a VL containing no more than 25 amino acid variations (e.g., no more than 25, 24, 23, 22, 21, 20, 19, 18, 17, 16, 15, 14, 13, 12, 11, 10, 9, 8, 7, 6, 5, 4, 3, 2, or 1 amino acid variation) as compared with the VL as set forth in SEQ ID NO: 105.

[0252] In some embodiments, the anti-TfR antibody of the present disclosure comprises a VH comprising an amino acid sequence that is at least 75% (e.g., 75%, 80%, 85%, 90%, 95%, 98%, or 99%) identical to the VH as set forth in SEQ ID NO: 104. Alternatively or in addition (e.g., in addition), the anti-TfR antibody of the present disclosure comprises a VL comprising an amino acid sequence that is at least 75% (e.g., 75%, 80%, 85%, 90%, 95%, 98%, or 99%) identical to the VL as set forth in SEQ ID NO: 105.

[0253] In some embodiments, the anti-TfR antibody of the present disclosure comprises a CDR-H1, a CDR-H2, and a CDR-H3 of a heavy chain variable domain having the amino acid sequence of SEQ ID NO: 112. Alternatively or in addition (e.g., in addition), the anti-TfR antibody of the present disclosure comprises a CDR-L1, a CDR-L2, and a CDR-L3 of a light chain variable domain having the amino acid sequence of SEQ ID NO: 113.

[0254] In some embodiments, the anti-TfR antibody of the present disclosure comprises a CDR-H1 having the amino acid sequence of SEQ ID NO: 106 (according to the IMGT definition system), a CDR-H2 having the amino acid sequence of SEQ ID NO: 107 (according to the IMGT definition system), a CDR-H3 having the amino acid sequence of SEQ ID NO: 108 (according to the IMGT definition system), a CDR-L1 having the amino acid sequence of SEQ ID NO: 109 (according to the IMGT definition system), a CDR-L2 having the amino acid sequence of SEQ ID NO: 110 (according to the IMGT definition system), and a CDR-L3 having the amino acid sequence of SEQ ID NO: 111 (according to the IMGT definition system).

[0255] In some embodiments, anti-TfR antibody of the present disclosure comprises a CDR-H1, a CDR-H2, and a CDR-H3, which collectively contains no more than 5 amino acid variations (e.g., no more than 5, 4, 3, 2, or 1 amino acid variation) as compared with the CDR-H1 having the amino acid sequence of SEQ ID NO: 106, CDR-H2 having the amino acid sequence of SEQ ID NO: 107, and CDR-H3 having the amino acid sequence of SEQ ID NO: 108. Alternatively or in addition (e.g., in addition), the anti-TfR antibody of the present disclosure comprises a CDR-L1, a CDR-L2, and a CDR-L3, which collectively contains no more than 5 amino acid variations (e.g., no more than 5, 4, 3, 2 or 1 amino acid variation) as compared with the CDR-L1 having the amino acid sequence of SEQ ID NO: 109, CDR-L2 having the amino acid sequence of SEQ ID NO: 110, and CDR-L3 having the amino acid sequence of SEQ ID NO: 111.

[0256] In some embodiments, the anti-TfR antibody of the present disclosure comprises a CDR-H1, a CDR-H2, and a CDR-H3 that collectively are at least 75% (e.g., 75%, 80%, 85%, 90%, 95%, 98%, or 99%) identical to the CDR-H1 having the amino acid sequence of SEQ ID NO: 106, CDR-H2 having the amino acid sequence of SEQ ID NO: 107, and CDR-H3 having the amino acid sequence of SEQ ID NO: 108. Alternatively or in addition (e.g., in addition), the anti-TfR antibody of the present disclosure comprises a CDR-L1, a CDR-L2, and a CDR-L3 that collectively are at least 75% (e.g., 75%, 80%, 85%, 90%, 95%, 98%, or 99%) identical to the to the CDR-L1 having the amino acid sequence of SEQ ID NO: 109, CDR-L2 having the amino acid sequence of SEQ ID NO: 110, and CDR-L3 having the amino acid sequence of SEQ ID NO: 111.

[0257] In some embodiments, the anti-TfR antibody of the present disclosure comprises: a CDR-H1 having no more than 3 amino acid variations (e.g., no more than 3, 2, or 1 amino acid variation) as compared with the CDR-H1 having the amino acid sequence of SEQ ID NO: 106; a CDR-H2 having no more than 3 amino acid variations (e.g., no more than 3, 2, or 1 amino acid variation) as compared with the CDR-H2 having the amino acid sequence of SEQ ID NO: 107; and/or (e.g., and) a CDR-H3 having no more than 3 amino acid variations (e.g., no more than 3, 2, or 1 amino acid variation) as compared with the CDR-H3 having the amino acid sequence of SEQ ID NO: 108. Alternatively or in addition (e.g., in addition), the anti-TfR antibody of the present disclosure comprises: a CDR-L1 having no more than 3 amino acid variations (e.g., no more than 3, 2, or 1 amino acid variation) as compared with the CDR-L1 having the amino acid sequence of SEQ ID NO: 109; a CDR-L2 having no more than 3 amino acid variations (e.g., no more than 3, 2, or 1 amino acid variation) as compared with the CDR-L2 having the amino acid sequence of SEQ ID NO: 110; and/or (e.g., and) a CDR-L3 having no more than 3 amino acid variations (e.g., no more than 3, 2, or 1 amino acid variation) as compared with the CDR-L3 having the amino acid sequence of SEQ ID NO: 111.

[0258] In some embodiments, the anti-TfR antibody of the present disclosure comprises a VH comprising the amino acid sequence of SEQ ID NO: 112. Alternatively or in addition (e.g., in addition), the anti-TfR antibody of the present disclosure comprises a VL comprising the amino acid sequence of SEQ ID NO: 113.

[0259] In some embodiments, the anti-TfR antibody of the present disclosure comprises a VH containing no more than 25 amino acid variations (e.g., no more than 25, 24, 23, 22, 21, 20, 19, 18, 17, 16, 15, 14, 13, 12, 11, 10, 9, 8, 7, 6, 5, 4, 3, 2, or 1 amino acid variation) as compared with the VH as set forth in SEQ ID NO: 112. Alternatively or in addition (e.g., in addition), the anti-TfR antibody of the present disclosure comprises a VL containing no more than 25 amino acid variations (e.g., no more than 25, 24, 23, 22, 21, 20, 19, 18, 17, 16, 15, 14, 13, 12, 11, 10, 9, 8, 7, 6, 5, 4, 3, 2, or 1 amino acid variation) as compared with the VL as set forth in SEQ ID NO: 113.

[0260] In some embodiments, the anti-TfR antibody of the present disclosure comprises a VH comprising an amino acid sequence that is at least 75% (e.g., 75%, 80%, 85%, 90%, 95%, 98%, or 99%) identical to the VH as set forth in SEQ ID NO: 112. Alternatively or in addition (e.g., in addition), the anti-TfR antibody of the present disclosure comprises a VL comprising an amino acid sequence that is at least 75% (e.g., 75%, 80%, 85%, 90%, 95%, 98%, or 99%) identical to the VL as set forth in SEQ ID NO: 113.

[0261] In some embodiments, the anti-TfR antibody of the present disclosure comprises a CDR-H1, a CDR-H2, and a CDR-H3 of a heavy chain variable domain having the amino acid sequence of SEQ ID NO: 117. Alternatively or in addition (e.g., in addition), the anti-TfR antibody of the present disclosure comprises a CDR-L1, a CDR-L2, and a CDR-L3 of a light chain variable domain having the amino acid sequence of SEQ ID NO: 118.

[0262] In some embodiments, the anti-TfR antibody of the present disclosure comprises a CDR-H1 having the amino acid sequence of SEQ ID NO: 79 (according to the IMGT definition system), a CDR-H2 having the amino acid sequence of SEQ ID NO: 114 (according to the IMGT definition system), a CDR-H3 having the amino acid sequence of SEQ ID NO: 115 (according to the IMGT definition system), a CDR-L1 having the amino acid sequence of SEQ ID NO: 82 (according to the IMGT definition system), a CDR-L2 having the amino acid sequence of SEQ ID NO: 83 (according to the IMGT definition system), and a CDR-L3 having the amino acid sequence of SEQ ID NO: 116 (according to the IMGT definition system).

[0263] In some embodiments, anti-TfR antibody of the present disclosure comprises a CDR-H1, a CDR-H2, and a CDR-H3, which collectively contains no more than 5 amino acid variations (e.g., no more than 5, 4, 3, 2, or 1 amino acid variation) as compared with the CDR-H1 having the amino acid sequence of SEQ ID NO: 79, CDR-H2 having the amino acid sequence of SEQ ID NO: 114, and CDR-H3 having the amino acid sequence of SEQ ID NO: 115. Alternatively or in addition (e.g., in addition), the anti-TfR antibody of the present disclosure comprises a CDR-L1, a CDR-L2, and a CDR-L3, which collectively contains no more than 5 amino acid variations (e.g., no more than 5, 4, 3, 2 or 1 amino acid variation) as compared with the CDR-L1 having the amino acid sequence of SEQ ID NO: 82, CDR-L2 having the amino acid sequence of SEQ ID NO: 83, and CDR-L3 having the amino acid sequence of SEQ ID NO: 116.

[0264] In some embodiments, the anti-TfR antibody of the present disclosure comprises a CDR-H1, a CDR-H2, and a CDR-H3 that collectively are at least 75% (e.g., 75%, 80%, 85%, 90%, 95%, 98%, or 99%) identical to the CDR-H1 having the amino acid sequence of SEQ ID NO: 79, CDR-H2 having the amino acid sequence of SEQ ID NO: 114, and CDR-H3 having the amino acid sequence of SEQ ID NO: 115. Alternatively or in addition (e.g., in addition), the anti-TfR antibody of the present disclosure comprises a CDR-L1, a CDR-L2, and a CDR-L3 that collectively are at least 75% (e.g., 75%, 80%, 85%, 90%, 95%, 98%, or 99%) identical to the to the CDR-L1 having the amino acid sequence of SEQ ID NO: 82, CDR-L2 having the amino acid sequence of SEQ ID NO: 83, and CDR-L3 having the amino acid sequence of SEQ ID NO: 116.

[0265] In some embodiments, the anti-TfR antibody of the present disclosure comprises: a CDR-H1 having no more than 3 amino acid variations (e.g., no more than 3, 2, or 1 amino acid variation) as compared with the CDR-H1 having the amino acid sequence of SEQ ID NO: 79; a CDR-H2 having no more than 3 amino acid variations (e.g., no more than 3, 2, or 1 amino acid variation) as compared with the CDR-H2 having the amino acid sequence of SEQ ID NO: 114; and/or (e.g., and) a CDR-H3 having no more than 3 amino acid variations (e.g., no more than 3, 2, or 1 amino acid variation) as compared with the CDR-H3 having the amino acid sequence of SEQ ID NO: 115. Alternatively or in addition (e.g., in addition), the anti-TfR antibody of the present disclosure comprises: a CDR-L1 having no more than 3 amino acid variations (e.g., no more than 3, 2, or 1 amino acid variation) as compared with the CDR-L1 having the amino acid sequence of SEQ ID NO: 82; a CDR-L2 having no more than 3 amino acid variations (e.g., no more than 3, 2, or 1 amino acid variation) as compared with the CDR-L2 having the amino acid sequence of SEQ ID NO: 83; and/or (e.g., and) a CDR-L3 having no more than 3 amino acid variations (e.g., no more than 3, 2, or 1 amino acid variation) as compared with the CDR-L3 having the amino acid sequence of SEQ ID NO: 116.

[0266] In some embodiments, the anti-TfR antibody of the present disclosure comprises a VH comprising the amino acid sequence of SEQ ID NO: 117. Alternatively or in addition (e.g., in addition), the anti-TfR antibody of the present disclosure comprises a VL comprising the amino acid sequence of SEQ ID NO: 118.

[0267] In some embodiments, the anti-TfR antibody of the present disclosure comprises a VH containing no more than 25 amino acid variations (e.g., no more than 25, 24, 23, 22, 21, 20, 19, 18, 17, 16, 15, 14, 13, 12, 11, 10, 9, 8, 7, 6, 5, 4, 3, 2, or 1 amino acid variation) as compared with the VH as set forth in SEQ ID NO: 117. Alternatively or in addition (e.g., in addition), the anti-TfR antibody of the present disclosure comprises a VL containing no more than 25 amino acid variations (e.g., no more than 25, 24, 23, 22, 21, 20, 19, 18, 17, 16, 15, 14, 13, 12, 11, 10, 9, 8, 7, 6, 5, 4, 3, 2, or 1 amino acid variation) as compared with the VL as set forth in SEQ ID NO: 118.

[0268] In some embodiments, the anti-TfR antibody of the present disclosure comprises a VH comprising an amino acid sequence that is at least 75% (e.g., 75%, 80%, 85%, 90%, 95%, 98%, or 99%) identical to the VH as set forth in SEQ ID NO: 117. Alternatively or in addition (e.g., in addition), the anti-TfR antibody of the present disclosure comprises a VL comprising an amino acid sequence that is at least 75% (e.g., 75%, 80%, 85%, 90%, 95%, 98%, or 99%) identical to the VL as set forth in SEQ ID NO: 118.

[0269] In some embodiments, the anti-TfR antibody of the present disclosure comprises a CDR-H1, a CDR-H2, and a CDR-H3 of a heavy chain variable domain having the amino acid sequence of SEQ ID NO: 124. Alternatively or in addition (e.g., in addition), the anti-TfR antibody of the present disclosure comprises a CDR-L1, a CDR-L2, and a CDR-L3 of a light chain variable domain having the amino acid sequence of SEQ ID NO: 125.

[0270] In some embodiments, the anti-TfR antibody of the present disclosure comprises a CDR-H1 having the amino acid sequence of SEQ ID NO: 119 (according to the IMGT definition system), a CDR-H2 having the amino acid sequence of SEQ ID NO: 120 (according to the IMGT definition system), a CDR-H3 having the amino acid sequence of SEQ ID NO: 121 (according to the IMGT definition system), a CDR-L1 having the amino acid sequence of SEQ ID NO: 122 (according to the IMGT definition system), a CDR-L2 having the amino acid sequence of SEQ ID NO: 45 (according to the IMGT definition system), and a CDR-L3 having the amino acid sequence of SEQ ID NO: 123 (according to the IMGT definition system).

[0271] In some embodiments, anti-TfR antibody of the present disclosure comprises a CDR-H1, a CDR-H2, and a CDR-H3, which collectively contains no more than 5 amino acid variations (e.g., no more than 5, 4, 3, 2, or 1 amino acid variation) as compared with the CDR-H1 having the amino acid sequence of SEQ ID NO: 119, CDR-H2 having the amino acid sequence of SEQ ID NO: 120, and CDR-H3 having the amino acid sequence of SEQ ID NO: 121. Alternatively or in addition (e.g., in addition), the anti-TfR antibody of the present disclosure comprises a CDR-L1, a CDR-L2, and a CDR-L3, which collectively contains no more than 5 amino acid variations (e.g., no more than 5, 4, 3, 2 or 1 amino acid variation) as compared with the CDR-L1 having the amino acid sequence of SEQ ID NO: 122, CDR-L2 having the amino acid sequence of SEQ ID NO: 45, and CDR-L3 having the amino acid sequence of SEQ ID NO: 123.

[0272] In some embodiments, the anti-TfR antibody of the present disclosure comprises a CDR-H1, a CDR-H2, and a CDR-H3 that collectively are at least 75% (e.g., 75%, 80%, 85%, 90%, 95%, 98%, or 99%) identical to the CDR-H1 having the amino acid sequence of SEQ ID NO: 119, CDR-H2 having the amino acid sequence of SEQ ID NO: 120, and CDR-H3 having the amino acid sequence of SEQ ID NO: 121. Alternatively or in addition (e.g., in addition), the anti-TfR antibody of the present disclosure comprises a CDR-L1, a CDR-L2, and a CDR-L3 that collectively are at least 75% (e.g., 75%, 80%, 85%, 90%, 95%, 98%, or 99%) identical to the to the CDR-L1 having the amino acid sequence of SEQ ID NO: 122, CDR-L2 having the amino acid sequence of SEQ ID NO: 45, and CDR-L3 having the amino acid sequence of SEQ ID NO: 123.

[0273] In some embodiments, the anti-TfR antibody of the present disclosure comprises: a CDR-H1 having no more than 3 amino acid variations (e.g., no more than 3, 2, or 1 amino acid variation) as compared with the CDR-H1 having the amino acid sequence of SEQ ID NO: 119; a CDR-H2 having no more than 3 amino acid variations (e.g., no more than 3, 2, or 1 amino acid variation) as compared with the CDR-H2 having the amino acid sequence of SEQ ID NO: 120; and/or (e.g., and) a CDR-H3 having no more than 3 amino acid variations (e.g., no more than 3, 2, or 1 amino acid variation) as compared with the CDR-H3 having the amino acid sequence of SEQ ID NO: 121. Alternatively or in addition (e.g., in addition), the anti-TfR antibody of the present disclosure comprises: a CDR-L1 having no more than 3 amino acid variations (e.g., no more than 3, 2, or 1 amino acid variation) as compared with the CDR-L1 having the amino acid sequence of SEQ ID NO: 122; a CDR-L2 having no more than 3 amino acid variations (e.g., no more than 3, 2, or 1 amino acid variation) as compared with the CDR-L2 having the amino acid sequence of SEQ ID NO: 45; and/or (e.g., and) a CDR-L3 having no more than 3 amino acid variations (e.g., no more than 3, 2, or 1 amino acid variation) as compared with the CDR-L3 having the amino acid sequence of SEQ ID NO: 123.

[0274] In some embodiments, the anti-TfR antibody of the present disclosure comprises a VH comprising the amino acid sequence of SEQ ID NO: 124. Alternatively or in addition (e.g., in addition), the anti-TfR antibody of the present disclosure comprises a VL comprising the amino acid sequence of SEQ ID NO: 125.

[0275] In some embodiments, the anti-TfR antibody of the present disclosure comprises a VH containing no more than 25 amino acid variations (e.g., no more than 25, 24, 23, 22, 21, 20, 19, 18, 17, 16, 15, 14, 13, 12, 11, 10, 9, 8, 7, 6, 5, 4, 3, 2, or 1 amino acid variation) as compared with the VH as set forth in SEQ ID NO: 124. Alternatively or in addition (e.g., in addition), the anti-TfR antibody of the present disclosure comprises a VL containing no more than 25 amino acid variations (e.g., no more than 25, 24, 23, 22, 21, 20, 19, 18, 17, 16, 15, 14, 13, 12, 11, 10, 9, 8, 7, 6, 5, 4, 3, 2, or 1 amino acid variation) as compared with the VL as set forth in SEQ ID NO: 125.

[0276] n some embodiments, the anti-TfR antibody of the present disclosure comprises a VH comprising an amino acid sequence that is at least 75% (e.g., 75%, 80%, 85%, 90%, 95%, 98%, or 99%) identical to the VH as set forth in SEQ ID NO: 124. Alternatively or in addition (e.g., in addition), the anti-TfR antibody of the present disclosure comprises a VL comprising an amino acid sequence that is at least 75% (e.g., 75%, 80%, 85%, 90%, 95%, 98%, or 99%) identical to the VL as set forth in SEQ ID NO: 125.

[0277] In some embodiments, the anti-TfR antibody of the present disclosure comprises a CDR-H1, a CDR-H2, and a CDR-H3 of a heavy chain variable domain having the amino acid sequence of SEQ ID NO: 132. Alternatively or in addition (e.g., in addition), the anti-TfR antibody of the present disclosure comprises a CDR-L1, a CDR-L2, and a CDR-L3 of a light chain variable domain having the amino acid sequence of SEQ ID NO: 133.

[0278] In some embodiments, the anti-TfR antibody of the present disclosure comprises a CDR-H1 having the amino acid sequence of SEQ ID NO: 126 (according to the IMGT definition system), a CDR-H2 having the amino acid sequence of SEQ ID NO: 127 (according to the IMGT definition system), a CDR-H3 having the amino acid sequence of SEQ ID NO: 128 (according to the IMGT definition system), a CDR-L1 having the amino acid sequence of SEQ ID NO: 129 (according to the IMGT definition system), a CDR-L2 having the amino acid sequence of SEQ ID NO: 130 (according to the IMGT definition system), and a CDR-L3 having the amino acid sequence of SEQ ID NO: 131 (according to the IMGT definition system).

[0279] In some embodiments, anti-TfR antibody of the present disclosure comprises a CDR-H1, a CDR-H2, and a CDR-H3, which collectively contains no more than 5 amino acid variations (e.g., no more than 5, 4, 3, 2, or 1 amino acid variation) as compared with the CDR-H1 having the amino acid sequence of SEQ ID NO: 126, CDR-H2 having the amino acid sequence of SEQ ID NO: 127, and CDR-H3 having the amino acid sequence of SEQ ID NO: 128. Alternatively or in addition (e.g., in addition), the anti-TfR antibody of the present disclosure comprises a CDR-L1, a CDR-L2, and a CDR-L3, which collectively contains no more than 5 amino acid variations (e.g., no more than 5, 4, 3, 2 or 1 amino acid variation) as compared with the CDR-L1 having the amino acid sequence of SEQ ID NO: 129, CDR-L2 having the amino acid sequence of SEQ ID NO: 130, and CDR-L3 having the amino acid sequence of SEQ ID NO: 131.

[0280] In some embodiments, the anti-TfR antibody of the present disclosure comprises a CDR-H1, a CDR-H2, and a CDR-H3 that collectively are at least 75% (e.g., 75%, 80%, 85%, 90%, 95%, 98%, or 99%) identical to the CDR-H1 having the amino acid sequence of SEQ ID NO: 126, CDR-H2 having the amino acid sequence of SEQ ID NO: 127, and CDR-H3 having the amino acid sequence of SEQ ID NO: 128. Alternatively or in addition (e.g., in addition), the anti-TfR antibody of the present disclosure comprises a CDR-L1, a CDR-L2, and a CDR-L3 that collectively are at least 75% (e.g., 75%, 80%, 85%, 90%, 95%, 98%, or 99%) identical to the to the CDR-L1 having the amino acid sequence of SEQ ID NO: 129, CDR-L2 having the amino acid sequence of SEQ ID NO: 130, and CDR-L3 having the amino acid sequence of SEQ ID NO: 131.

[0281] In some embodiments, the anti-TfR antibody of the present disclosure comprises: a CDR-H1 having no more than 3 amino acid variations (e.g., no more than 3, 2, or 1 amino acid variation) as compared with the CDR-H1 having the amino acid sequence of SEQ ID NO: 126; a CDR-H2 having no more than 3 amino acid variations (e.g., no more than 3, 2, or 1 amino acid variation) as compared with the CDR-H2 having the amino acid sequence of SEQ ID NO: 127; and/or (e.g., and) a CDR-H3 having no more than 3 amino acid variations (e.g., no more than 3, 2, or 1 amino acid variation) as compared with the CDR-H3 having the amino acid sequence of SEQ ID NO: 128. Alternatively or in addition (e.g., in addition), the anti-TfR antibody of the present disclosure comprises: a CDR-L1 having no more than 3 amino acid variations (e.g., no more than 3, 2, or 1 amino acid variation) as compared with the CDR-L1 having the amino acid sequence of SEQ ID NO: 129; a CDR-L2 having no more than 3 amino acid variations (e.g., no more than 3, 2, or 1 amino acid variation) as compared with the CDR-L2 having the amino acid sequence of SEQ ID NO: 130; and/or (e.g., and) a CDR-L3 having no more than 3 amino acid variations (e.g., no more than 3, 2, or 1 amino acid variation) as compared with the CDR-L3 having the amino acid sequence of SEQ ID NO: 131.

[0282] In some embodiments, the anti-TfR antibody of the present disclosure comprises a VH comprising the amino acid sequence of SEQ ID NO: 132. Alternatively or in addition (e.g., in addition), the anti-TfR antibody of the present disclosure comprises a VL comprising the amino acid sequence of SEQ ID NO: 133.

[0283] In some embodiments, the anti-TfR antibody of the present disclosure comprises a VH containing no more than 25 amino acid variations (e.g., no more than 25, 24, 23, 22, 21, 20, 19, 18, 17, 16, 15, 14, 13, 12, 11, 10, 9, 8, 7, 6, 5, 4, 3, 2, or 1 amino acid variation) as compared with the VH as set forth in SEQ ID NO: 132. Alternatively or in addition (e.g., in addition), the anti-TfR antibody of the present disclosure comprises a VL containing no more than 25 amino acid variations (e.g., no more than 25, 24, 23, 22, 21, 20, 19, 18, 17, 16, 15, 14, 13, 12, 11, 10, 9, 8, 7, 6, 5, 4, 3, 2, or 1 amino acid variation) as compared with the VL as set forth in SEQ ID NO: 133.

[0284] In some embodiments, the anti-TfR antibody of the present disclosure comprises a VH comprising an amino acid sequence that is at least 75% (e.g., 75%, 80%, 85%, 90%, 95%, 98%, or 99%) identical to the VH as set forth in SEQ ID NO: 132. Alternatively or in addition (e.g., in addition), the anti-TfR antibody of the present disclosure comprises a VL comprising an amino acid sequence that is at least 75% (e.g., 75%, 80%, 85%, 90%, 95%, 98%, or 99%) identical to the VL as set forth in SEQ ID NO: 133.

[0285] In some embodiments, the anti-TfR antibody of the present disclosure comprises a CDR-H1, a CDR-H2, and a CDR-H3 of a heavy chain variable domain having the amino acid sequence of SEQ ID NO: 136. Alternatively or in addition (e.g., in addition), the anti-TfR antibody of the present disclosure comprises a CDR-L1, a CDR-L2, and a CDR-L3 of a light chain variable domain having the amino acid sequence of SEQ ID NO: 137.

[0286] In some embodiments, the anti-TfR antibody of the present disclosure comprises a CDR-H1 having the amino acid sequence of SEQ ID NO: 79 (according to the IMGT definition system), a CDR-H2 having the amino acid sequence of SEQ ID NO: 2 (according to the IMGT definition system), a CDR-H3 having the amino acid sequence of SEQ ID NO: 134 (according to the IMGT definition system), a CDR-L1 having the amino acid sequence of SEQ ID NO: 75 (according to the IMGT definition system), a CDR-L2 having the amino acid sequence of SEQ ID NO: 45 (according to the IMGT definition system), and a CDR-L3 having the amino acid sequence of SEQ ID NO: 135 (according to the IMGT definition system).

[0287] In some embodiments, anti-TfR antibody of the present disclosure comprises a CDR-H1, a CDR-H2, and a CDR-H3, which collectively contains no more than 5 amino acid variations (e.g., no more than 5, 4, 3, 2, or 1 amino acid variation) as compared with the CDR-H1 having the amino acid sequence of SEQ ID NO: 79, CDR-H2 having the amino acid sequence of SEQ ID NO: 2, and CDR-H3 having the amino acid sequence of SEQ ID NO: 134. Alternatively or in addition (e.g., in addition), the anti-TfR antibody of the present disclosure comprises a CDR-L1, a CDR-L2, and a CDR-L3, which collectively contains no more than 5 amino acid variations (e.g., no more than 5, 4, 3, 2 or 1 amino acid variation) as compared with the CDR-L1 having the amino acid sequence of SEQ ID NO: 75, CDR-L2 having the amino acid sequence of SEQ ID NO: 45, and CDR-L3 having the amino acid sequence of SEQ ID NO: 135.

[0288] In some embodiments, the anti-TfR antibody of the present disclosure comprises a CDR-H1, a CDR-H2, and a CDR-H3 that collectively are at least 75% (e.g., 75%, 80%, 85%, 90%, 95%, 98%, or 99%) identical to the CDR-H1 having the amino acid sequence of SEQ ID NO: 79, CDR-H2 having the amino acid sequence of SEQ ID NO: 2, and CDR-H3 having the amino acid sequence of SEQ ID NO: 134. Alternatively or in addition (e.g., in addition), the anti-TfR antibody of the present disclosure comprises a CDR-L1, a CDR-L2, and a CDR-L3 that collectively are at least 75% (e.g., 75%, 80%, 85%, 90%, 95%, 98%, or 99%) identical to the to the CDR-L1 having the amino acid sequence of SEQ ID NO: 75, CDR-L2 having the amino acid sequence of SEQ ID NO: 45, and CDR-L3 having the amino acid sequence of SEQ ID NO: 135.

[0289] In some embodiments, the anti-TfR antibody of the present disclosure comprises: a CDR-H1 having no more than 3 amino acid variations (e.g., no more than 3, 2, or 1 amino acid variation) as compared with the CDR-H1 having the amino acid sequence of SEQ ID NO: 79; a CDR-H2 having no more than 3 amino acid variations (e.g., no more than 3, 2, or 1 amino acid variation) as compared with the CDR-H2 having the amino acid sequence of SEQ ID NO: 2; and/or (e.g., and) a CDR-H3 having no more than 3 amino acid variations (e.g., no more than 3, 2, or 1 amino acid variation) as compared with the CDR-H3 having the amino acid sequence of SEQ ID NO: 134. Alternatively or in addition (e.g., in addition), the anti-TfR antibody of the present disclosure comprises: a CDR-L1 having no more than 3 amino acid variations (e.g., no more than 3, 2, or 1 amino acid variation) as compared with the CDR-L1 having the amino acid sequence of SEQ ID NO: 75; a CDR-L2 having no more than 3 amino acid variations (e.g., no more than 3, 2, or 1 amino acid variation) as compared with the CDR-L2 having the amino acid sequence of SEQ ID NO: 45; and/or (e.g., and) a CDR-L3 having no more than 3 amino acid variations (e.g., no more than 3, 2, or 1 amino acid variation) as compared with the CDR-L3 having the amino acid sequence of SEQ ID NO: 135.

[0290] In some embodiments, the anti-TfR antibody of the present disclosure comprises a VH comprising the amino acid sequence of SEQ ID NO: 136. Alternatively or in addition (e.g., in addition), the anti-TfR antibody of the present disclosure comprises a VL comprising the amino acid sequence of SEQ ID NO: 137.

[0291] In some embodiments, the anti-TfR antibody of the present disclosure comprises a VH containing no more than 25 amino acid variations (e.g., no more than 25, 24, 23, 22, 21, 20, 19, 18, 17, 16, 15, 14, 13, 12, 11, 10, 9, 8, 7, 6, 5, 4, 3, 2, or 1 amino acid variation) as compared with the VH as set forth in SEQ ID NO: 136. Alternatively or in addition (e.g., in addition), the anti-TfR antibody of the present disclosure comprises a VL containing no more than 25 amino acid variations (e.g., no more than 25, 24, 23, 22, 21, 20, 19, 18, 17, 16, 15, 14, 13, 12, 11, 10, 9, 8, 7, 6, 5, 4, 3, 2, or 1 amino acid variation) as compared with the VL as set forth in SEQ ID NO: 137.

[0292] In some embodiments, the anti-TfR antibody of the present disclosure comprises a VH comprising an amino acid sequence that is at least 75% (e.g., 75%, 80%, 85%, 90%, 95%, 98%, or 99%) identical to the VH as set forth in SEQ ID NO: 136. Alternatively or in addition (e.g., in addition), the anti-TfR antibody of the present disclosure comprises a VL comprising an amino acid sequence that is at least 75% (e.g., 75%, 80%, 85%, 90%, 95%, 98%, or 99%) identical to the VL as set forth in SEQ ID NO: 137.

[0293] In some embodiments, the anti-TfR antibody of the present disclosure comprises a CDR-H1, a CDR-H2, and a CDR-H3 of a heavy chain variable domain having the amino acid sequence of SEQ ID NO: 143. Alternatively or in addition (e.g., in addition), the anti-TfR antibody of the present disclosure comprises a CDR-L1, a CDR-L2, and a CDR-L3 of a light chain variable domain having the amino acid sequence of SEQ ID NO: 144.

[0294] In some embodiments, the anti-TfR antibody of the present disclosure comprises a CDR-H1 having the amino acid sequence of SEQ ID NO: 138 (according to the IMGT definition system), a CDR-H2 having the amino acid sequence of SEQ ID NO: 139 (according to the IMGT definition system), a CDR-H3 having the amino acid sequence of SEQ ID NO: 140 (according to the IMGT definition system), a CDR-L1 having the amino acid sequence of SEQ ID NO: 141 (according to the IMGT definition system), a CDR-L2 having the amino acid sequence of SEQ ID NO: 29 (according to the IMGT definition system), and a CDR-L3 having the amino acid sequence of SEQ ID NO: 142 (according to the IMGT definition system).

[0295] In some embodiments, anti-TfR antibody of the present disclosure comprises a CDR-H1, a CDR-H2, and a CDR-H3, which collectively contains no more than 5 amino acid variations (e.g., no more than 5, 4, 3, 2, or 1 amino acid variation) as compared with the CDR-H1 having the amino acid sequence of SEQ ID NO: 138, CDR-H2 having the amino acid sequence of SEQ ID NO: 139, and CDR-H3 having the amino acid sequence of SEQ ID NO: 140. Alternatively or in addition (e.g., in addition), the anti-TfR antibody of the present disclosure comprises a CDR-L1, a CDR-L2, and a CDR-L3, which collectively contains no more than 5 amino acid variations (e.g., no more than 5, 4, 3, 2 or 1 amino acid variation) as compared with the CDR-L1 having the amino acid sequence of SEQ ID NO: 141, CDR-L2 having the amino acid sequence of SEQ ID NO: 29, and CDR-L3 having the amino acid sequence of SEQ ID NO: 142.

[0296] In some embodiments, the anti-TfR antibody of the present disclosure comprises a CDR-H1, a CDR-H2, and a CDR-H3 that collectively are at least 75% (e.g., 75%, 80%, 85%, 90%, 95%, 98%, or 99%) identical to the CDR-H1 having the amino acid sequence of SEQ ID NO: 138, CDR-H2 having the amino acid sequence of SEQ ID NO: 139, and CDR-H3 having the amino acid sequence of SEQ ID NO: 140. Alternatively or in addition (e.g., in addition), the anti-TfR antibody of the present disclosure comprises a CDR-L1, a CDR-L2, and a CDR-L3 that collectively are at least 75% (e.g., 75%, 80%, 85%, 90%, 95%, 98%, or 99%) identical to the to the CDR-L1 having the amino acid sequence of SEQ ID NO: 141, CDR-L2 having the amino acid sequence of SEQ ID NO: 29, and CDR-L3 having the amino acid sequence of SEQ ID NO: 142.

[0297] In some embodiments, the anti-TfR antibody of the present disclosure comprises: a CDR-H1 having no more than 3 amino acid variations (e.g., no more than 3, 2, or 1 amino acid variation) as compared with the CDR-H1 having the amino acid sequence of SEQ ID NO: 138; a CDR-H2 having no more than 3 amino acid variations (e.g., no more than 3, 2, or 1 amino acid variation) as compared with the CDR-H2 having the amino acid sequence of SEQ ID NO: 139; and/or (e.g., and) a CDR-H3 having no more than 3 amino acid variations (e.g., no more than 3, 2, or 1 amino acid variation) as compared with the CDR-H3 having the amino acid sequence of SEQ ID NO: 140. Alternatively or in addition (e.g., in addition), the anti-TfR antibody of the present disclosure comprises: a CDR-L1 having no more than 3 amino acid variations (e.g., no more than 3, 2, or 1 amino acid variation) as compared with the CDR-L1 having the amino acid sequence of SEQ ID NO: 141; a CDR-L2 having no more than 3 amino acid variations (e.g., no more than 3, 2, or 1 amino acid variation) as compared with the CDR-L2 having the amino acid sequence of SEQ ID NO: 29; and/or (e.g., and) a CDR-L3 having no more than 3 amino acid variations (e.g., no more than 3, 2, or 1 amino acid variation) as compared with the CDR-L3 having the amino acid sequence of SEQ ID NO: 142.

[0298] In some embodiments, the anti-TfR antibody of the present disclosure comprises a VH comprising the amino acid sequence of SEQ ID NO: 143. Alternatively or in addition (e.g., in addition), the anti-TfR antibody of the present disclosure comprises a VL comprising the amino acid sequence of SEQ ID NO: 144.

[0299] In some embodiments, the anti-TfR antibody of the present disclosure comprises a VH containing no more than 25 amino acid variations (e.g., no more than 25, 24, 23, 22, 21, 20, 19, 18, 17, 16, 15, 14, 13, 12, 11, 10, 9, 8, 7, 6, 5, 4, 3, 2, or 1 amino acid variation) as compared with the VH as set forth in SEQ ID NO: 143. Alternatively or in addition (e.g., in addition), the anti-TfR antibody of the present disclosure comprises a VL containing no more than 25 amino acid variations (e.g., no more than 25, 24, 23, 22, 21, 20, 19, 18, 17, 16, 15, 14, 13, 12, 11, 10, 9, 8, 7, 6, 5, 4, 3, 2, or 1 amino acid variation) as compared with the VL as set forth in SEQ ID NO: 144.

[0300] In some embodiments, the anti-TfR antibody of the present disclosure comprises a VH comprising an amino acid sequence that is at least 75% (e.g., 75%, 80%, 85%, 90%, 95%, 98%, or 99%) identical to the VH as set forth in SEQ ID NO: 143. Alternatively or in addition (e.g., in addition), the anti-TfR antibody of the present disclosure comprises a VL comprising an amino acid sequence that is at least 75% (e.g., 75%, 80%, 85%, 90%, 95%, 98%, or 99%) identical to the VL as set forth in SEQ ID NO: 144.

[0301] The CDRs of an antibody may have different amino acid sequences when different definition systems are used (e.g., the IMGT definition, the Kabat definition, or the Chothia definition). A definition system annotates each amino acid in a given antibody sequence (e.g., VH or VL sequence) with a number, and numbers corresponding to the heavy chain and light chain CDRs are provided in Table 3. The CDRs listed in Table 2 are defined in accordance with the IMGT definition. CDR sequences of examples of anti-TfR antibodies according to the different definition systems are provided in Table 4. One skilled in the art is able to derive the CDR sequences using the different numbering systems for the anti-TfR antibodies provided in Table 2.

TABLE 3

CDR Definitions

| | IMGT¹ | Kabat² | Chothia³ |
|---|---|---|---|
| CDR-H1 | 27-38 | 31-35 | 26-32 |
| CDR-H2 | 56-65 | 50-65 | 53-55 |
| CDR-H3 | 105-116/117 | 95-102 | 96-101 |
| CDR-L1 | 27-38 | 24-34 | 26-32 |
| CDR-L2 | 56-65 | 50-56 | 50-52 |
| CDR-L3 | 105-116/117 | 89-97 | 91-96 |

¹ IMGT®, the international ImMunoGeneTics Information System®, imgt.org, Lefranc, M.-P. et al., Nucleic Acids Res., 27:209-212 (1999)
²Kabat et al. (1991) Sequences of Proteins of Immunological Interest, Fifth Edition, U.S. Department of Health and Human Services, NIH Publication No. 91-3242
³Chothia et al., J. Mol. Biol. 196:901-917 (1987))

TABLE 4

CDR sequences of examples of anti-TfR antibodies according to different definition systems

| | | | | |
|---|---|---|---|---|
| | No. system | IMGT | Kabat | Chothia |
| 3-A4 | CDR-H1 | GFNIKDDY (SEQ ID NO: 1) | DDYMY (SEQ ID NO: 145) | GFNIKDD (SEQ ID NO: 150) |
| | CDR-H2 | IDPENGDT (SEQ ID NO: 2) | WIDPENGDTEYASKFQD (SEQ ID NO: 146) | ENG (SEQ ID NO: 151) |
| | CDR-H3 | TLWLRRGLDY (SEQ ID NO: 3) | WLRRGLDY (SEQ ID NO: 147) | LRRGLD (SEQ ID NO: 152) |
| | CDR-L1 | KSLLHSNGYTY (SEQ ID NO: 4) | RSSKSLLHSNGYTYLF (SEQ ID NO: 148) | SKSLLHSNGYTY(SEQ ID NO: 153) |
| | CDR-L2 | RMS (SEQ ID NO: 5) | RMSNLAS (SEQ ID NO: 149) | RMS(SEQ ID NO: 5) |
| | CDR-L3 | MQHLEYPFT (SEQ ID NO: 6) | MQHLEYPFT (SEQ ID NO: 6) | HLEYPF (SEQ ID NO: 154) |
| 3-A4 Variant 1 | CDR-H1 | GFNIKDDY (SEQ ID NO: 1) | DDYMY (SEQ ID NO: 145) | GFNIKDD (SEQ ID NO: 150) |
| | CDR-H2 | IDPETGDT (SEQ ID NO: 262) | WIDPETGDTEYASKFQD (SEQ ID NO: 263) | ETG (SEQ ID NO: 270) |
| | CDR-H3 | TLWLRRGLDY (SEQ ID NO: 3) | WLRRGLDY (SEQ ID NO: 147) | LRRGLD (SEQ ID NO: 152) |
| | CDR-L1 | KSLLHSNGYTY (SEQ ID NO: 4) | RSSKSLLHSNGYTYLF (SEQ ID NO: 148) | SKSLLHSNGYTY(SEQ ID NO: 153) |
| | CDR-L2 | RMS (SEQ ID NO: 5) | RMSNLAS (SEQ ID NO: 149) | RMS(SEQ ID NO: 5) |
| | CDR-L3 | MQHLEYPFT (SEQ ID NO: 6) | MQHLEYPFT (SEQ ID NO: 6) | HLEYPF (SEQ ID NO: 154) |
| 3-A4 Variant 2 | CDR-H1 | GFNIKDDY (SEQ ID NO: 1) | DDYMY (SEQ ID NO: 145) | GFNIKDD (SEQ ID NO: 150) |
| | CDR-H2 | IDPESGDT (SEQ ID NO: 80) | WIDPESGDTEYASKFQD (SEQ ID NO: 265) | ESG (SEQ ID NO: 271) |
| | CDR-H3 | TLWLRRGLDY (SEQ ID NO: 3) | WLRRGLDY (SEQ ID NO: 147) | LRRGLD (SEQ ID NO: 152) |
| | CDR-L1 | KSLLHSNGYTY (SEQ ID NO: 4) | RSSKSLLHSNGYTYLF (SEQ ID NO: 148) | SKSLLHSNGYTY(SEQ ID NO: 153) |
| | CDR-L2 | RMS (SEQ ID NO: 5) | RMSNLAS (SEQ ID NO: 149) | RMS(SEQ ID NO: 5) |
| | CDR-L3 | MQHLEYPFT (SEQ ID NO: 6) | MQHLEYPFT (SEQ ID NO: 6) | HLEYPF (SEQ ID NO: 154) |
| 3-M12 | CDR-H1 | GYSITSGYY (SEQ ID NO: 9) | SGYYWN (SEQ ID NO: 155) | GYSITSGY (SEQ ID NO: 160) |
| | CDR-H2 | ITFDGAN (SEQ ID NO: 10) | YITFDGANNYNPSLKN (SEQ ID NO: 156) | FDG (SEQ ID NO: 161) |
| | CDR-H3 | TRSSYDYDVLDY (SEQ ID NO: 11) | SSYDYDVLDY (SEQ ID NO: 157) | SYDYDVLD (SEQ ID NO: 162) |
| | CDR-L1 | QDISNF (SEQ ID NO: 12) | RASQDISNFLN (SEQ ID NO: 158) | SQDISNF (SEQ ID NO: 163) |
| | CDR-L2 | YTS (SEQ ID NO: 13) | YTSRLHS (SEQ ID NO: 159) | YTS (SEQ ID NO: 13) |
| | CDR-L3 | QQGHTLPYT (SEQ ID NO: 14) | QQGHTLPYT (SEQ ID NO: 14) | GHTLPY (SEQ ID NO: 164) |
| 5-H12 | CDR-H1 | GYSFTDYC (SEQ ID NO: 17) | DYCIN (SEQ ID NO: 165) | GYSFTDY (SEQ ID NO: 170) |
| | CDR-H2 | IYPGSGNT (SEQ ID NO: 18) | WIYPGSGNTRYSERFKG (SEQ ID NO: 166) | GSG (SEQ ID NO: 171) |
| | CDR-H3 | AREDYYPYHGMDY (SEQ ID NO: 19) | EDYYPYHGMDY (SEQ ID NO: 167) | DYYPYHGMD (SEQ ID NO: 172) |
| | CDR-L1 | ESVDGYDNSF (SEQ ID NO: 20) | RASES VDGYDNSFMH (SEQ ID NO: 168) | SESVDGYDNSF (SEQ ID NO: 173) |
| | CDR-L2 | RAS (SEQ ID NO: 21) | RASNLES (SEQ ID NO: 169) | RAS (SEQ ID NO: 21) |
| | CDR-L3 | QQSSEDPWT (SEQ ID NO: 22) | QQSSEDPWT (SEQ ID NO: 22) | SSEDPW (SEQ ID NO: 174) |
| 5-H12 Variant 1 | CDR-H1 | GYSFTDYY (SEQ ID NO: 266) | DYYIN (SEQ ID NO: 267) | GYSFTDY (SEQ ID NO: 170) |
| | CDR-H2 | IYPGSGNT (SEQ ID NO: 18) | WIYPGSGNTRYSERFKG (SEQ ID NO: 166) | GSG (SEQ ID NO: 171) |
| | CDR-H3 | AREDYYPYHGMDY (SEQ ID NO: 19) | EDYYPYHGMDY (SEQ ID NO: 167) | DYYPYHGMD (SEQ ID NO: 172) |
| | CDR-L1 | ESVDGYDNSF (SEQ ID NO: 20) | RASES VDGYDNSFMH (SEQ ID NO: 168) | SESVDGYDNSF (SEQ ID NO: 173) |
| | CDR-L2 | RAS (SEQ ID NO: 21) | RASNLES (SEQ ID NO: 169) | RAS (SEQ ID NO: 21) |
| | CDR-L3 | QQSSEDPWT (SEQ ID NO: 22) | QQSSEDPWT (SEQ ID NO: 22) | SSEDPW (SEQ ID NO: 174) |
| 5-H12 Variant 2 | CDR-H1 | GYSFTDYD (SEQ ID NO: 268) | DYDIN (SEQ ID NO: 269) | GYSFTDY (SEQ ID NO: 170) |
| | CDR-H2 | IYPGSGNT (SEQ ID NO: 18) | WIYPGSGNTRYSERFKG (SEQ ID NO: 166) | GSG (SEQ ID NO: 171) |
| | CDR-H3 | AREDYYPYHGMDY (SEQ ID NO: 19) | EDYYPYHGMDY (SEQ ID NO: 167) | DYYPYHGMD (SEQ ID NO: 172) |
| | CDR-L1 | ESVDGYDNSF (SEQ ID NO: 20) | RASES VDGYDNSFMH (SEQ ID NO: 168) | SESVDGYDNSF (SEQ ID NO: 173) |
| | CDR-L2 | RAS (SEQ ID NO: 21) | RASNLES (SEQ ID NO: 169) | RAS (SEQ ID NO: 21) |
| | CDR-L3 | QQSSEDPWT (SEQ ID NO: 22) | QQSSEDPWT (SEQ ID NO: 22) | SSEDPW (SEQ ID NO: 174) |

[0302] In some embodiments, the anti-TfR antibody of the present disclosure comprises a CDR-H1 having the amino acid sequence of SEQ ID NO: 145 (according to the Kabat definition system), a CDR-H2 having the amino acid sequence of SEQ ID NO: 146, SEQ ID NO: 263, or SEQ ID NO: 265 (according to the Kabat definition system), a CDR-H3 having the amino acid sequence of SEQ ID NO: 147 (according to the Kabat definition system), a CDR-L1 having the amino acid sequence of SEQ ID NO: 148 (according to the Kabat definition system), a CDR-L2 having the amino acid sequence of SEQ ID NO: 149 (according to the Kabat definition system), and a CDR-L3 having the amino acid sequence of SEQ ID NO: 6 (according to the Kabat definition system).

[0303] In some embodiments, anti-TfR antibody of the present disclosure comprises a CDR-H1, a CDR-H2, and a CDR-H3, which collectively contains no more than 5 amino acid variations (e.g., no more than 5, 4, 3, 2, or 1 amino acid variation) as compared with the CDR-H1 having the amino acid sequence of SEQ ID NO: 145, CDR-H2 having the amino acid sequence of SEQ ID NO: 146, SEQ ID NO: 263, or SEQ ID NO: 265, and CDR-H3 having the amino acid sequence of SEQ ID NO: 147. Alternatively or in addition (e.g., in addition), the anti-TfR antibody of the present disclosure comprises a CDR-L1, a CDR-L2, and a CDR-L3, which collectively contains no more than 5 amino acid variations (e.g., no more than 5, 4, 3, 2 or 1 amino acid variation) as compared with the CDR-L1 having the amino acid sequence of SEQ ID NO: 148, CDR-L2 having the amino acid sequence of SEQ ID NO: 149, and CDR-L3 having the amino acid sequence of SEQ ID NO: 6.

[0304] In some embodiments, the anti-TfR antibody of the present disclosure comprises a CDR-H1, a CDR-H2, and a CDR-H3 that collectively are at least 75% (e.g., 75%, 80%, 85%, 90%, 95%, 98%, or 99%) identical to the CDR-H1 having the amino acid sequence of SEQ ID NO: 145, CDR-H2 having the amino acid sequence of SEQ ID NO: 146, SEQ ID NO: 263, or SEQ ID NO: 265, and CDR-H3 having the amino acid sequence of SEQ ID NO: 147. Alternatively or in addition (e.g., in addition), the anti-TfR antibody of the present disclosure comprises a CDR-L1, a CDR-L2, and a CDR-L3 that collectively are at least 75% (e.g., 75%, 80%, 85%, 90%, 95%, 98%, or 99%) identical to the to the CDR-L1 having the amino acid sequence of SEQ ID NO: 148, CDR-L2 having the amino acid sequence of SEQ ID NO: 149, and CDR-L3 having the amino acid sequence of SEQ ID NO: 6.

[0305] In some embodiments, the anti-TfR antibody of the present disclosure comprises: a CDR-H1 having no more than 3 amino acid variations (e.g., no more than 3, 2, or 1 amino acid variation) as compared with the CDR-H1 having the amino acid sequence of SEQ ID NO: 145; a CDR-H2 having no more than 3 amino acid variations (e.g., no more than 3, 2, or 1 amino acid variation) as compared with the CDR-H2 having the amino acid sequence of SEQ ID NO: 146, SEQ ID NO: 263, or SEQ ID NO: 265; and/or (e.g., and) a CDR-H3 having no more than 3 amino acid variations (e.g., no more than 3, 2, or 1 amino acid variation) as compared with the CDR-H3 having the amino acid sequence of SEQ ID NO: 147. Alternatively or in addition (e.g., in addition), the anti-TfR antibody of the present disclosure comprises: a CDR-L1 having no more than 3 amino acid variations (e.g., no more than 3, 2, or 1 amino acid variation) as compared with the CDR-L1 having the amino acid sequence of SEQ ID NO: 148; a CDR-L2 having no more than 3 amino acid variations (e.g., no more than 3, 2, or 1 amino acid variation) as compared with the CDR-L2 having the amino acid sequence of SEQ ID NO: 149; and/or (e.g., and) a CDR-L3 having no more than 3 amino acid variations (e.g., no more than 3, 2, or 1 amino acid variation) as compared with the CDR-L3 having the amino acid sequence of SEQ ID NO: 6.

[0306] In some embodiments, the anti-TfR antibody of the present disclosure comprises a CDR-H1 having the amino acid sequence of SEQ ID NO: 150 (according to the Chothia definition system), a CDR-H2 having the amino acid sequence of SEQ ID NO: 151, SEQ ID NO: 270, or SEQ ID NO: 271 (according to the Chothia definition system), a CDR-H3 having the amino acid sequence of SEQ ID NO: 152 (according to the Chothia definition system), a CDR-L1 having the amino acid sequence of SEQ ID NO: 153 (according to the Chothia definition system), a CDR-L2 having the amino acid sequence of SEQ ID NO: 5 (according to the Chothia definition system), and a CDR-L3 having the amino acid sequence of SEQ ID NO: 154 (according to the Chothia definition system).

[0307] In some embodiments, anti-TfR antibody of the present disclosure comprises a CDR-H1, a CDR-H2, and a CDR-H3, which collectively contains no more than 5 amino acid variations (e.g., no more than 5, 4, 3, 2, or 1 amino acid variation) as compared with the CDR-H1 having the amino acid sequence of SEQ ID NO: 150, CDR-H2 having the amino acid sequence of SEQ ID NO: 151, SEQ ID NO: 270, or SEQ ID NO: 271, and CDR-H3 having the amino acid sequence of SEQ ID NO: 152. Alternatively or in addition (e.g., in addition), the anti-TfR antibody of the present disclosure comprises a CDR-L1, a CDR-L2, and a CDR-L3, which collectively contains no more than 5 amino acid variations (e.g., no more than 5, 4, 3, 2 or 1 amino acid variation) as compared with the CDR-L1 having the amino acid sequence of SEQ ID NO: 153, CDR-L2 having the amino acid sequence of SEQ ID NO: 5, and CDR-L3 having the amino acid sequence of SEQ ID NO: 154.

[0308] In some embodiments, the anti-TfR antibody of the present disclosure comprises a CDR-H1, a CDR-H2, and a CDR-H3 that collectively are at least 75% (e.g., 75%, 80%, 85%, 90%, 95%, 98%, or 99%) identical to the CDR-H1 having the amino acid sequence of SEQ ID NO: 150, CDR-H2 having the amino acid sequence of SEQ ID NO: 151, SEQ ID NO: 270, or SEQ ID NO: 271, and CDR-H3 having the amino acid sequence of SEQ ID NO: 152. Alternatively or in addition (e.g., in addition), the anti-TfR antibody of the present disclosure comprises a CDR-L1, a CDR-L2, and a CDR-L3 that collectively are at least 75% (e.g., 75%, 80%, 85%, 90%, 95%, 98%, or 99%) identical to the to the CDR-L1 having the amino acid sequence of SEQ ID NO: 153, CDR-L2 having the amino acid sequence of SEQ ID NO: 5, and CDR-L3 having the amino acid sequence of SEQ ID NO: 154.

[0309] In some embodiments, the anti-TfR antibody of the present disclosure comprises: a CDR-H1 having no more than 3 amino acid variations (e.g., no more than 3, 2, or 1 amino acid variation) as compared with the CDR-H1 having the amino acid sequence of SEQ ID NO: 150; a CDR-H2 having no more than 3 amino acid variations (e.g., no more than 3, 2, or 1 amino acid variation) as compared with the CDR-H2 having the amino acid sequence of SEQ ID NO: 151, SEQ ID NO: 270, or SEQ ID NO: 271; and/or (e.g., and) a CDR-H3 having no more than 3 amino acid variations (e.g., no more than 3, 2, or 1 amino acid variation) as compared with the CDR-H3 having the amino acid sequence of SEQ ID NO: 152. Alternatively or in addition (e.g., in addition), the anti-TfR antibody of the present disclosure comprises: a CDR-L1 having no more than 3 amino acid variations (e.g., no more than 3, 2, or 1 amino acid variation) as compared with the CDR-L1 having the amino acid sequence of SEQ ID NO: 153; a CDR-L2 having no more than 3 amino acid variations (e.g., no more than 3, 2, or 1 amino acid variation) as compared with the CDR-L2 having the amino acid sequence of SEQ ID NO: 5; and/or (e.g., and) a CDR-L3 having no more than 3 amino acid variations (e.g., no more than 3, 2, or 1 amino acid variation) as compared with the CDR-L3 having the amino acid sequence of SEQ ID NO: 154.

[0310] In some embodiments, the anti-TfR antibody of the present disclosure comprises a CDR-H1 having the amino acid sequence of SEQ ID NO: 155 (according to the Kabat definition system), a CDR-H2 having the amino acid sequence of SEQ ID NO: 156 (according to the Kabat definition system), a CDR-H3 having the amino acid sequence of SEQ ID NO: 157 (according to the Kabat definition system), a CDR-L1 having the amino acid sequence of SEQ ID NO: 158 (according to the Kabat definition system), a CDR-L2 having the amino acid sequence of SEQ ID NO: 159 (according to the Kabat definition system), and a CDR-L3 having the amino acid sequence of SEQ ID NO: 14 (according to the Kabat definition system).

[0311] In some embodiments, anti-TfR antibody of the present disclosure comprises a CDR-H1, a CDR-H2, and a CDR-H3, which collectively contains no more than 5 amino acid variations (e.g., no more than 5, 4, 3, 2, or 1 amino acid variation) as compared with the CDR-H1 having the amino acid sequence of SEQ ID NO: 155, CDR-H2 having the amino acid sequence of SEQ ID NO: 156, and CDR-H3 having the amino acid sequence of SEQ ID NO: 157. Alternatively or in addition (e.g., in addition), the anti-TfR antibody of the present disclosure comprises a CDR-L1, a CDR-L2, and a CDR-L3, which collectively contains no more than 5 amino acid variations (e.g., no more than 5, 4, 3, 2 or 1 amino acid variation) as compared with the CDR-L1 having the amino acid sequence of SEQ ID NO: 158, CDR-L2 having the amino acid sequence of SEQ ID NO: 159, and CDR-L3 having the amino acid sequence of SEQ ID NO: 14.

[0312] In some embodiments, the anti-TfR antibody of the present disclosure comprises a CDR-H1, a CDR-H2, and a CDR-H3 that collectively are at least 75% (e.g., 75%, 80%, 85%, 90%, 95%, 98%, or 99%) identical to the CDR-H1 having the amino acid sequence of SEQ ID NO: 155, CDR-H2 having the amino acid sequence of SEQ ID NO: 156, and CDR-H3 having the amino acid sequence of SEQ ID NO: 157. Alternatively or in addition (e.g., in addition), the anti-TfR antibody of the present disclosure comprises a CDR-L1, a CDR-L2, and a CDR-L3 that collectively are at least 75% (e.g., 75%, 80%, 85%, 90%, 95%, 98%, or 99%) identical to the to the CDR-L1 having the amino acid sequence of SEQ ID NO: 158, CDR-L2 having the amino acid sequence of SEQ ID NO: 159, and CDR-L3 having the amino acid sequence of SEQ ID NO: 14.

[0313] In some embodiments, the anti-TfR antibody of the present disclosure comprises: a CDR-H1 having no more than 3 amino acid variations (e.g., no more than 3, 2, or 1 amino acid variation) as compared with the CDR-H1 having the amino acid sequence of SEQ ID NO: 155; a CDR-H2 having no more than 3 amino acid variations (e.g., no more than 3, 2, or 1 amino acid variation) as compared with the CDR-H2 having the amino acid sequence of SEQ ID NO: 156; and/or (e.g., and) a CDR-H3 having no more than 3 amino acid variations (e.g., no more than 3, 2, or 1 amino acid variation) as compared with the CDR-H3 having the amino acid sequence of SEQ ID NO: 157. Alternatively or in addition (e.g., in addition), the anti-TfR antibody of the present disclosure comprises: a CDR-L1 having no more than 3 amino acid variations (e.g., no more than 3, 2, or 1 amino acid variation) as compared with the CDR-L1 having the amino acid sequence of SEQ ID NO: 158; a CDR-L2 having no more than 3 amino acid variations (e.g., no more than 3, 2, or 1 amino acid variation) as compared with the CDR-L2 having the amino acid sequence of SEQ ID NO: 159; and/or (e.g., and) a CDR-L3 having no more than 3 amino acid variations (e.g., no more than 3, 2, or 1 amino acid variation) as compared with the CDR-L3 having the amino acid sequence of SEQ ID NO: 14.

[0314] In some embodiments, the anti-TfR antibody of the present disclosure comprises a CDR-H1 having the amino acid sequence of SEQ ID NO: 160 (according to the Chothia definition system), a CDR-H2 having the amino acid sequence of SEQ ID NO: 161 (according to the Chothia definition system), a CDR-H3 having the amino acid sequence of SEQ ID NO: 162 (according to the Chothia definition system), a CDR-L1 having the amino acid sequence of SEQ ID NO: 163 (according to the Chothia definition system), a CDR-L2 having the amino acid sequence of SEQ ID NO: 13 (according to the Chothia definition system), and a CDR-L3 having the amino acid sequence of SEQ ID NO: 164 (according to the Chothia definition system).

[0315] In some embodiments, anti-TfR antibody of the present disclosure comprises a CDR-H1, a CDR-H2, and a CDR-H3, which collectively contains no more than 5 amino acid variations (e.g., no more than 5, 4, 3, 2, or 1 amino acid variation) as compared with the CDR-H1 having the amino acid sequence of SEQ ID NO: 160, CDR-H2 having the amino acid sequence of SEQ ID NO: 161, and CDR-H3 having the amino acid sequence of SEQ ID NO: 162. Alternatively or in addition (e.g., in addition), the anti-TfR antibody of the present disclosure comprises a CDR-L1, a CDR-L2, and a CDR-L3, which collectively contains no more than 5 amino acid variations (e.g., no more than 5, 4, 3, 2 or 1 amino acid variation) as compared with the CDR-L1 having the amino acid sequence of SEQ ID NO: 163, CDR-L2 having the amino acid sequence of SEQ ID NO: 13, and CDR-L3 having the amino acid sequence of SEQ ID NO: 164.

[0316] In some embodiments, the anti-TfR antibody of the present disclosure comprises a CDR-H1, a CDR-H2, and a CDR-H3 that collectively are at least 75% (e.g., 75%, 80%, 85%, 90%, 95%, 98%, or 99%) identical to the CDR-H1 having the amino acid sequence of SEQ ID NO: 160, CDR-H2 having the amino acid sequence of SEQ ID NO: 161, and CDR-H3 having the amino acid sequence of SEQ ID NO: 162. Alternatively or in addition (e.g., in addition), the anti-TfR antibody of the present disclosure comprises a CDR-L1, a CDR-L2, and a CDR-L3 that collectively are at least 75% (e.g., 75%, 80%, 85%, 90%, 95%, 98%, or 99%) identical to the to the CDR-L1 having the amino acid sequence of SEQ ID NO: 163, CDR-L2 having the amino acid sequence of SEQ ID NO: 13, and CDR-L3 having the amino acid sequence of SEQ ID NO: 164.

[0317] In some embodiments, the anti-TfR antibody of the present disclosure comprises: a CDR-H1 having no more than 3 amino acid variations (e.g., no more than 3, 2, or 1 amino acid variation) as compared with the CDR-H1 having the amino acid sequence of SEQ ID NO: 160; a CDR-H2 having no more than 3 amino acid variations (e.g., no more than 3, 2, or 1 amino acid variation) as compared with the CDR-H2 having the amino acid sequence of SEQ ID NO: 161; and/or (e.g., and) a CDR-H3 having no more than 3 amino acid variations (e.g., no more than 3, 2, or 1 amino acid variation) as compared with the CDR-H3 having the amino acid sequence of SEQ ID NO: 162. Alternatively or in addition (e.g., in addition), the anti-TfR antibody of the present disclosure comprises: a CDR-L1 having no more than 3 amino acid variations (e.g., no more than 3, 2, or 1 amino acid variation) as compared with the CDR-L1 having the amino acid sequence of SEQ ID NO: 163; a CDR-L2 having no more than 3 amino acid variations (e.g., no more than 3, 2, or 1 amino acid variation) as compared with the CDR-L2 having the amino acid sequence of SEQ ID NO: 13; and/or (e.g., and) a CDR-L3 having no more than 3 amino acid variations (e.g., no more than 3, 2, or 1 amino acid variation) as compared with the CDR-L3 having the amino acid sequence of SEQ ID NO: 164.

[0318] In some embodiments, the anti-TfR antibody of the present disclosure comprises a CDR-H1 having the amino acid sequence of SEQ ID NO: 165, SEQ ID NO: 267, or SEQ ID NO: 269 (according to the Kabat definition system), a CDR-H2 having the amino acid sequence of SEQ ID NO: 166 (according to the Kabat definition system), a CDR-H3 having the amino acid sequence of SEQ ID NO: 167 (according to the Kabat definition system), a CDR-L1 having the amino acid sequence of SEQ ID NO: 168 (according to the Kabat definition system), a CDR-L2 having the amino acid sequence of SEQ ID NO: 169 (according to the Kabat definition system), and a CDR-L3 having the amino acid sequence of SEQ ID NO: 22 (according to the Kabat definition system).

[0319] In some embodiments, anti-TfR antibody of the present disclosure comprises a CDR-H1, a CDR-H2, and a CDR-H3, which collectively contains no more than 5 amino acid variations (e.g., no more than 5, 4, 3, 2, or 1 amino acid variation) as compared with the CDR-H1 having the amino acid sequence of SEQ ID NO: 165, SEQ ID NO: 267, or SEQ ID NO: 269, CDR-H2 having the amino acid sequence of SEQ ID NO: 166, and CDR-H3 having the amino acid sequence of SEQ ID NO: 167. Alternatively or in addition (e.g., in addition), the anti-TfR antibody of the present disclosure comprises a CDR-L1, a CDR-L2, and a CDR-L3, which collectively contains no more than 5 amino acid variations (e.g., no more than 5, 4, 3, 2 or 1 amino acid variation) as compared with the CDR-L1 having the amino acid sequence of SEQ ID NO: 168, CDR-L2 having the amino acid sequence of SEQ ID NO: 169, and CDR-L3 having the amino acid sequence of SEQ ID NO: 22.

[0320] In some embodiments, the anti-TfR antibody of the present disclosure comprises a CDR-H1, a CDR-H2, and a CDR-H3 that collectively are at least 75% (e.g., 75%, 80%, 85%, 90%, 95%, 98%, or 99%) identical to the CDR-H1 having the amino acid sequence of SEQ ID NO: 165, SEQ ID NO: 267, or SEQ ID NO: 269, CDR-H2 having the amino acid sequence of SEQ ID NO: 166, and CDR-H3 having the amino acid sequence of SEQ ID NO: 167. Alternatively or in addition (e.g., in addition), the anti-TfR antibody of the present disclosure comprises a CDR-L1, a CDR-L2, and a CDR-L3 that collectively are at least 75% (e.g., 75%, 80%, 85%, 90%, 95%, 98%, or 99%) identical to the to the CDR-L1 having the amino acid sequence of SEQ ID NO: 168, CDR-L2 having the amino acid sequence of SEQ ID NO: 169, and CDR-L3 having the amino acid sequence of SEQ ID NO: 22.

[0321] In some embodiments, the anti-TfR antibody of the present disclosure comprises: a CDR-H1 having no more than 3 amino acid variations (e.g., no more than 3, 2, or 1 amino acid variation) as compared with the CDR-H1 having the amino acid sequence of SEQ ID NO: 165, SEQ ID NO: 267, or SEQ ID NO: 269; a CDR-H2 having no more than 3 amino acid variations (e.g., no more than 3, 2, or 1 amino acid variation) as compared with the CDR-H2 having the amino acid sequence of SEQ ID NO: 166; and/or (e.g., and) a CDR-H3 having no more than 3 amino acid variations (e.g., no more than 3, 2, or 1 amino acid variation) as compared with the CDR-H3 having the amino acid sequence of SEQ ID NO: 167. Alternatively or in addition (e.g., in addition), the anti-TfR antibody of the present disclosure comprises: a CDR-L1 having no more than 3 amino acid variations (e.g., no more than 3, 2, or 1 amino acid variation) as compared with the CDR-L1 having the amino acid sequence of SEQ ID NO: 168; a CDR-L2 having no more than 3 amino acid variations (e.g., no more than 3, 2, or 1 amino acid variation) as compared with the CDR-L2 having the amino acid sequence of SEQ ID NO: 169; and/or (e.g., and) a CDR-L3 having no more than 3 amino acid variations (e.g., no more than 3, 2, or 1 amino acid variation) as compared with the CDR-L3 having the amino acid sequence of SEQ ID NO: 22.

[0322] In some embodiments, the anti-TfR antibody of the present disclosure comprises a CDR-H1 having the amino acid sequence of SEQ ID NO: 170 (according to the Chothia definition system), a CDR-H2 having the amino acid sequence of SEQ ID NO: 171 (according to the Chothia definition system), a CDR-H3 having the amino acid sequence of SEQ ID NO: 172 (according to the Chothia definition system), a CDR-L1 having the amino acid sequence of SEQ ID NO: 173 (according to the Chothia definition system), a CDR-L2 having the amino acid sequence of SEQ ID NO: 21 (according to the Chothia definition system), and a CDR-L3 having the amino acid sequence of SEQ ID NO: 174 (according to the Chothia definition system).

[0323] In some embodiments, anti-TfR antibody of the present disclosure comprises a CDR-H1, a CDR-H2, and a CDR-H3, which collectively contains no more than 5 amino acid variations (e.g., no more than 5, 4, 3, 2, or 1 amino acid variation) as compared with the CDR-H1 having the amino acid sequence of SEQ ID NO: 170, CDR-H2 having the amino acid sequence of SEQ ID NO: 171, and CDR-H3 having the amino acid sequence of SEQ ID NO: 172. Alternatively or in addition (e.g., in addition), the anti-TfR antibody of the present disclosure comprises a CDR-L1, a CDR-L2, and a CDR-L3, which collectively contains no more than 5 amino acid variations (e.g., no more than 5, 4, 3, 2 or 1 amino acid variation) as compared with the CDR-L1 having the amino acid sequence of SEQ ID NO: 173, CDR-L2 having the amino acid sequence of SEQ ID NO: 21, and CDR-L3 having the amino acid sequence of SEQ ID NO: 174.

[0324] In some embodiments, the anti-TfR antibody of the present disclosure comprises a CDR-H1, a CDR-H2, and a CDR-H3 that collectively are at least 75% (e.g., 75%, 80%, 85%, 90%, 95%, 98%, or 99%) identical to the CDR-H1 having the amino acid sequence of SEQ ID NO: 170, CDR-H2 having the amino acid sequence of SEQ ID NO: 171, and CDR-H3 having the amino acid sequence of SEQ ID NO: 172. Alternatively or in addition (e.g., in addition), the anti-TfR antibody of the present disclosure comprises a CDR-L1, a CDR-L2, and a CDR-L3 that collectively are at least 75% (e.g., 75%, 80%, 85%, 90%, 95%, 98%, or 99%) identical to the to the CDR-L1 having the amino acid sequence of SEQ ID NO: 173, CDR-L2 having the amino acid sequence of SEQ ID NO: 21, and CDR-L3 having the amino acid sequence of SEQ ID NO: 174.

[0325] In some embodiments, the anti-TfR antibody of the present disclosure comprises: a CDR-H1 having no more than 3 amino acid variations (e.g., no more than 3, 2, or 1 amino acid variation) as compared with the CDR-H1 having the amino acid sequence of SEQ ID NO: 170; a CDR-H2 having no more than 3 amino acid variations (e.g., no more than 3, 2, or 1 amino acid variation) as compared with the CDR-H2 having the amino acid sequence of SEQ ID NO: 171; and/or (e.g., and) a CDR-H3 having no more than 3 amino acid variations (e.g., no more than 3, 2, or 1 amino acid variation) as compared with the CDR-H3 having the amino acid sequence of SEQ ID NO: 172. Alternatively or in addition (e.g., in addition), the anti-TfR antibody of the present disclosure comprises: a CDR-L1 having no more than 3 amino acid variations (e.g., no more than 3, 2, or 1 amino acid variation) as compared with the CDR-L1 having the amino acid sequence of SEQ ID NO: 173; a CDR-L2 having no more than 3 amino acid variations (e.g., no more than 3, 2, or 1 amino acid variation) as compared with the CDR-L2 having the amino acid sequence of SEQ ID NO: 21; and/or (e.g., and) a CDR-L3 having no more than 3 amino acid variations (e.g., no more than 3, 2, or 1 amino acid variation) as compared with the CDR-L3 having the amino acid sequence of SEQ ID NO: 174.

[0326] In some embodiments, the anti-TfR antibody of the present disclosure is a humanized antibody (e.g., a humanized variant containing one or more CDRs of Table 2 or Table 4). In some embodiments, the anti-TfR antibody of the present disclosure comprises a CDR-H1, a CDR-H2, a CDR-H3, a CDR-L1, a CDR-L2, and a CDR-L3 that are the same as the CDR-H1, CDR-H2, and CDR-H3 shown in Table 2 or Table 4, and comprises a humanized heavy chain variable region and/or (e.g., and) a humanized light chain variable region.

[0327] Humanized antibodies are human immunoglobulins (recipient antibody) in which residues from a complementary determining region (CDR) of the recipient are replaced by residues from a CDR of a non-human species (donor antibody) such as mouse, rat, or rabbit having the desired specificity, affinity, and capacity. In some embodiments, Fv framework region (FR) residues of the human immunoglobulin are replaced by corresponding non-human residues. Furthermore, the humanized antibody may comprise residues that are found neither in the recipient antibody nor in the imported CDR or framework sequences, but are included to further refine and optimize antibody performance. In general, the humanized antibody will comprise substantially all of at least one, and typically two, variable domains, in which all or substantially all of the CDR regions correspond to those of a non-human immunoglobulin and all or substantially all of the FR regions are those of a human immunoglobulin consensus sequence. The humanized antibody optimally also will comprise at least a portion of an immunoglobulin constant region or domain (Fc), typically that of a human immunoglobulin. Antibodies may have Fc regions modified as described in WO 99/58572. Other forms of humanized antibodies have one or more CDRs (one, two, three, four, five, six) which are altered with respect to the original antibody, which are also termed one or more CDRs derived from one or more CDRs from the original antibody. Humanized antibodies may also involve affinity maturation.

[0328] Humanized antibodies and methods of making them are known, e.g., as described in Almagro et al., Front. Biosci. 13:1619-1633 (2008); Riechmann et al., Nature 332:323-329 (1988); Queen et al., Proc. Nat’l Acad. Sci. USA 86:10029-10033 (1989); U.S. Pat. Nos. 5,821,337, 7,527,791, 6,982,321, and 7,087,409; Kashmiri et al., Methods 36:25-34 (2005); Padlan et al., Mol. Immunol. 28:489-498 (1991); Dall′ Acqua et al., Methods 36:43-60 (2005); Osbourn et al., Methods 36:61-68 (2005); and Klimka et al., Br. J. Cancer, 83:252-260 (2000), the contents of all of which are incorporated herein by reference. Human framework regions that may be used for humanization are described in e.g., Sims et al. J. Immunol. 151:2296 (1993); Carter et al. Proc. Natl. Acad. Sci. USA, 89:4285 (1992); Presta et al. J. Immunol., 151:2623 (1993); Almagro et al., Front. Biosci. 13:1619-1633 (2008)); Baca et al., J. Biol. Chem. 272:10678-10684 (1997); and Rosok et al., J Biol. Chem. 271:22611-22618 (1996), the contents of all of which are incorporated herein by reference. In some embodiments, humanization is achieved by grafting the CDRs (e.g., as shown in Table 2 or Table 4) into the IGKV1-NL1*01 and IGHV1-3*01 human variable domains.

[0329] In some embodiments, a humanized VH framework or VL framework is a consensus human framework. In some embodiments, a consensus humanized framework can represent the most commonly occurring amino acid residue in a selection of human immunoglobulin VL or VH framework sequences.

[0330] In some embodiments, the consensus human VH framework regions suitable for use with heavy chain CDRs in the humanized anti-TfR antibodies described herein include (subgroup III consensus):

a) VH FR1: [sequence omitted] (SEQ ID NO: 272);
b) VH FR2: WVRQAPGKGLEWV (SEQ ID NO: 273);
c) VH FR3: RFTISRDNSKNTLYLQMNSLRAEDTAVYYC (SEQ ID NO:274); and
d) VH FR4: WGQGTLVTVSS (SEQ ID NO: 275).

[0331] In some embodiments, the consensus human VH framework regions suitable for use with heavy chain CDRs in the humanized anti-TfR antibodies described herein include (subgroup I consensus):

a) VH FR1: [sequence omitted] (SEQ ID NO: 276);
b) VH FR2: WVRQAPGQGLEWM (SEQ ID NO: 277);
c) VH FR3: RVTITADTSTSTAYMELSSLRSEDTAVYYC (SEQ ID NO:278); and
d) VH FR4: WGQGTLVTVSS (SEQ ID NO: 275).

[0332] In some embodiments, the consensus human VH framework regions suitable for use with heavy chain CDRs in the humanized anti-TfR antibodies described herein include (subgroup II consensus):

a) VH FR1: QVQLQESGPGLVKPSQTLSLTCTVS (SEQ ID NO: 280);
b) VH FR2: WIRQPPGKGLEWI (SEQ ID NO:281);
c) VH FR3: RVTISVDTSKNQFSLKLSSVTAADTAVYYC (SEQ ID NO:282); and
d) VH FR4: WGQGTLVTVSS (SEQ ID NO: 275).

[0333] In some embodiments, the consensus human VL framework regions suitable for use with light chain CDRs in the humanized anti-TfR antibodies described herein include (subgroup I consensus):

a) VL FR1: DIQMTQSPSSLSASVGDRVTITC (SEQ ID NO: 284);
b) VL FR2: WYQQKPGKAPKLLIY (SEQ ID NO: 285);
c) VL FR3: GVPSRFSGSGSGTDFTLTISSLQPEDFATYYC (SEQ ID NO:286); and
d) VL FR4: FGQGTKVEIK (SEQ ID NO:279).

[0334] In some embodiments, the consensus human VL framework regions suitable for use with light chain CDRs in the humanized anti-TfR antibodies described herein include (subgroup II consensus):

a) VL FR1: DIVMTQSPLSLPVTPGEPASISC (SEQ ID NO: 288);
b) VL FR2: WYLQKPGQSPQLLIY (SEQ ID NO:289);
c) VL FR3: GVPDRFSGSGSGTDFTLKISRVEAEDVGVYYC (SEQ ID NO:290); and
d) VL FR4: FGQGTKVEIK (SEQ ID NO: 279).

[0335] In some embodiments, the consensus human VL framework regions suitable for use with light chain CDRs in the humanized anti-TfR antibodies described herein include (subgroup III consensus):

a) VL FR1: DIVMTQSPDSLAVSLGERATINC (SEQ ID NO: 283);
b) VL FR2: WYQQKPGQPPKLLIY (SEQ ID NO: 287);
c) VL FR3: GVPDRFSGSGSGTDFTLTISSLQAEDFAVYYC (SEQ ID NO:291); and
d) VL FR4: FGQGTKVEIK (SEQ ID NO: 279).

[0336] In some embodiments, the consensus human VL framework regions suitable for use with light chain CDRs in the humanized anti-TfR antibodies described herein include (subgroup IV consensus):

a) VL FR1: DIVMTQSPDSLAVSLGERATINC (SEQ ID NO: 283);
b) VL FR2: WYQQKPGQPPKLLIY (SEQ ID NO: 287);
c) VL FR3: GVPDRFSGSGSGTDFTLTISSLQAEDFAVYYC (SEQ ID NO:291); and
d) VL FR4: FGQGTKVEIK (SEQ ID NO: 279).

[0337] In some embodiments, the humanized anti-TfR antibody of the present disclosure comprises humanized VH framework regions that collectively contain no more than 25 amino acid variations (e.g., no more than 25, 24, 23, 22, 21, 20, 19, 18, 17, 16, 15, 14, 13, 12, 11, 10, 9, 8, 7, 6, 5, 4, 3, 2, or 1 amino acid variation) as compared with any one of the consensus human VH framework region subgroups described herein. Alternatively or in addition (e.g., in addition), the humanized anti-TfR antibody of the present disclosure comprises humanized VL framework regions that collectively contain no more than 25 amino acid variations (e.g., no more than 25, 24, 23, 22, 21, 20, 19, 18, 17, 16, 15, 14, 13, 12, 11, 10, 9, 8, 7, 6, 5, 4, 3, 2, or 1 amino acid variation) as compared with any one of the consensus human VL framework region subgroups described herein.

[0338] In some embodiments, the humanized anti-TfR antibody of the present disclosure comprises humanized VH framework regions that collectively are at least 75% (e.g., 75%, 80%, 85%, 90%, 95%, 98%, or 99%) identical to any one of the consensus human VH framework region subgroups described herein. Alternatively or in addition (e.g., in addition), the humanized anti-TfR antibody of the present disclosure comprises humanized VL framework regions that are at least 75% (e.g., 75%, 80%, 85%, 90%, 95%, 98%, or 99%) identical to any one of the consensus human VL framework region subgroups described herein.

[0339] In some embodiments, the anti-TfR antibody of the present disclosure is a humanized variant comprising one or more amino acid variations (e.g., in the VH framework region) as compared with any one of the VHs listed in Table 2 or Table 4, and/or (e.g., and) one or more amino acid variations (e.g., in the VL framework region) as compared with any one of the VLs listed in Table 2 or Table 4.

[0340] In some embodiments, the anti-TfR antibody of the present disclosure is a humanized antibody comprising a VH containing no more than 25 amino acid variations (e.g., no more than 25, 24, 23, 22, 21, 20, 19, 18, 17, 16, 15, 14, 13, 12, 11, 10, 9, 8, 7, 6, 5, 4, 3, 2, or 1 amino acid variation) as compared with the VH of any of the anti-TfR antibodies listed in Table 2. Alternatively or in addition (e.g., in addition), the anti-TfR antibody of the present disclosure is a humanized antibody comprising a VL containing no more than 25 amino acid variations (e.g., no more than 25, 24, 23, 22, 21, 20, 19, 18, 17, 16, 15, 14, 13, 12, 11, 10, 9, 8, 7, 6, 5, 4, 3, 2, or 1 amino acid variation) as compared with the VL of any one of the anti-TfR antibodies listed in Table 2.

[0341] In some embodiments, the anti-TfR antibody of the present disclosure is a humanized antibody comprising a VH comprising an amino acid sequence that is at least 75% (e.g., 75%, 80%, 85%, 90%, 95%, 98%, or 99%) identical to the VH as set forth in any one of SEQ ID NOs: 7, 15, and 23. Alternatively or in addition (e.g., in addition), the anti-TfR antibody of the present disclosure is a humanized antibody comprising a VL comprising an amino acid sequence that is at least 75% (e.g., 75%, 80%, 85%, 90%, 95%, 98%, or 99%) identical to the VL as set forth in any one of SEQ ID NOs: 8, 16, and 24.

[0342] In some embodiments, the anti-TfR antibody of the present disclosure is a humanized antibody comprising a VH containing no more than 25 amino acid variations (e.g., no more than 25, 24, 23, 22, 21, 20, 19, 18, 17, 16, 15, 14, 13, 12, 11, 10, 9, 8, 7, 6, 5, 4, 3, 2, or 1 amino acid variation) as compared with the VH as set forth in any one of SEQ ID NOs: 7, 15, and 23. Alternatively or in addition (e.g., in addition), the anti-TfR antibody of the present disclosure is a humanized antibody comprising a VL containing no more than 25 amino acid variations (e.g., no more than 25, 24, 23, 22, 21, 20, 19, 18, 17, 16, 15, 14, 13, 12, 11, 10, 9, 8, 7, 6, 5, 4, 3, 2, or 1 amino acid variation) as compared with the VL as set forth in any one of SEQ ID NOs: 8, 16, and 24.

[0343] In some embodiments, the anti-TfR antibody of the present disclosure is a humanized antibody comprising a VH comprising an amino acid sequence that is at least 75% (e.g., 75%, 80%, 85%, 90%, 95%, 98%, or 99%) identical to the VH as set forth in any one of SEQ ID NOs: 7, 15, and 23. Alternatively or in addition (e.g., in addition), the anti-TfR antibody of the present disclosure is a humanized antibody comprising a VL comprising an amino acid sequence that is at least 75% (e.g., 75%, 80%, 85%, 90%, 95%, 98%, or 99%) identical to the VL as set forth in any one of SEQ ID NOs: 8, 16, and 24.

[0344] In some embodiments, the anti-TfR antibody of the present disclosure is a humanized antibody comprising a VH having one or more (e.g., 10-25) amino acid variations at positions 1, 2, 5, 9, 11, 12, 13, 17, 20, 23, 33, 38, 40, 41, 42, 43, 44, 45, 48, 49, 55, 67, 68, 70, 71, 72, 76, 77, 80, 81, 82, 84, 87, 88, 91, 95, 112, or 115 relative to the VH as set forth in any one of SEQ ID NOs: 7, 15, and 23. Alternatively or in addition (e.g., in addition), the anti-TfR antibody of the present disclosure is a humanized antibody comprising a VL having one or more (e.g., 10-20) amino acid variations at positions 4, 7, 8, 9, 11, 15, 17, 18, 19, 22, 39, 41, 42, 43, 50, 62, 64, 72, 75, 77, 79, 80, 81, 82, 83, 85, 87, 89, 100, 104, or 109 relative to the VL as set forth in any one of SEQ ID NOs: 8, 16, and 24.

[0345] In some embodiments, the anti-TfR antibody of the present disclosure comprises a humanized VH comprising a CDR-H1 having the amino acid sequence of SEQ ID NO: 1 (according to the IMGT definition system), a CDR-H2 having the amino acid sequence of SEQ ID NO: 2, SEQ ID NO: 262, or SEQ ID NO: 80 (according to the IMGT definition system), a CDR-H3 having the amino acid sequence of SEQ ID NO: 3 (according to the IMGT definition system), and containing no more than 25 amino acid variations (e.g., no more than 25, 24, 23, 22, 21, 20, 19, 18, 17, 16, 15, 14, 13, 12, 11, 10, 9, 8, 7, 6, 5, 4, 3, 2, or 1 amino acid variation) in the framework regions as compared with the VH as set forth in SEQ ID NO: 7. Alternatively or in addition (e.g., in addition), the anti-TfR antibody of the present disclosure comprises a humanized VL comprising a CDR-L1 having the amino acid sequence of SEQ ID NO: 4 (according to the IMGT definition system), a CDR-L2 having the amino acid sequence of SEQ ID NO: 5 (according to the IMGT definition system), and a CDR-L3 having the amino acid sequence of SEQ ID NO: 6 (according to the IMGT definition system), and containing no more than 25 amino acid variations (e.g., no more than 25, 24, 23, 22, 21, 20, 19, 18, 17, 16, 15, 14, 13, 12, 11, 10, 9, 8, 7, 6, 5, 4, 3, 2, or 1 amino acid variation) in the framework regions as compared with the VL as set forth in SEQ ID NO: 8.

[0346] In some embodiments, the anti-TfR antibody of the present disclosure comprises a humanized VH comprising a CDR-H1 having the amino acid sequence of SEQ ID NO: 1 (according to the IMGT definition system), a CDR-H2 having the amino acid sequence of SEQ ID NO: 2, SEQ ID NO: 262, or SEQ ID NO: 80 (according to the IMGT definition system), a CDR-H3 having the amino acid sequence of SEQ ID NO: 3 (according to the IMGT definition system), and is at least 75% (e.g., 75%, 80%, 85%, 90%, 95%, 98%, or 99%) identical in the framework regions to the VH as set forth in SEQ ID NO: 7. Alternatively or in addition (e.g., in addition), the anti-TfR antibody of the present disclosure comprises a humanized VL comprising a CDR-L1 having the amino acid sequence of SEQ ID NO: 4 (according to the IMGT definition system), a CDR-L2 having the amino acid sequence of SEQ ID NO: 5 (according to the IMGT definition system), and a CDR-L3 having the amino acid sequence of SEQ ID NO: 6 (according to the IMGT definition system), and is at least 75% (e.g., 75%, 80%, 85%, 90%, 95%, 98%, or 99%) identical in the framework regions to the VL as set forth in SEQ ID NO: 8.

[0347] In some embodiments, the anti-TfR antibody of the present disclosure comprises a humanized VH comprising a CDR-H1 having the amino acid sequence of SEQ ID NO: 145 (according to the Kabat definition system), a CDR-H2 having the amino acid sequence of SEQ ID NO: 146, SEQ ID NO: 263, or SEQ ID NO: 265 (according to the Kabat definition system), a CDR-H3 having the amino acid sequence of SEQ ID NO: 147 (according to the Kabat definition system), and containing no more than 25 amino acid variations (e.g., no more than 25, 24, 23, 22, 21, 20, 19, 18, 17, 16, 15, 14, 13, 12, 11, 10, 9, 8, 7, 6, 5, 4, 3, 2, or 1 amino acid variation) in the framework regions as compared with the VH as set forth in SEQ ID NO: 7. Alternatively or in addition (e.g., in addition), the anti-TfR antibody of the present disclosure comprises a humanized VL comprising a CDR-L1 having the amino acid sequence of SEQ ID NO: 148 (according to the Kabat definition system), a CDR-L2 having the amino acid sequence of SEQ ID NO: 149 (according to the Kabat definition system), and a CDR-L3 having the amino acid sequence of SEQ ID NO: 6 (according to the Kabat definition system), and containing no more than 25 amino acid variations (e.g., no more than 25, 24, 23, 22, 21, 20, 19, 18, 17, 16, 15, 14, 13, 12, 11, 10, 9, 8, 7, 6, 5, 4, 3, 2, or 1 amino acid variation) in the framework regions as compared with the VL as set forth in SEQ ID NO: 8.

[0348] In some embodiments, the anti-TfR antibody of the present disclosure comprises a humanized VH comprising a CDR-H1 having the amino acid sequence of SEQ ID NO: 145 (according to the Kabat definition system), a CDR-H2 having the amino acid sequence of SEQ ID NO: 146, SEQ ID NO: 263, or SEQ ID NO: 265 (according to the Kabat definition system), a CDR-H3 having the amino acid sequence of SEQ ID NO: 147 (according to the Kabat definition system), and is at least 75% (e.g., 75%, 80%, 85%, 90%, 95%, 98%, or 99%) identical in the framework regions to the VH as set forth in SEQ ID NO: 7. Alternatively or in addition (e.g., in addition), the anti-TfR antibody of the present disclosure comprises a humanized VL comprising a CDR-L1 having the amino acid sequence of SEQ ID NO: 148 (according to the Kabat definition system), a CDR-L2 having the amino acid sequence of SEQ ID NO: 149 (according to the Kabat definition system), and a CDR-L3 having the amino acid sequence of SEQ ID NO: 6 (according to the Kabat definition system), and is at least 75% (e.g., 75%, 80%, 85%, 90%, 95%, 98%, or 99%) identical in the framework regions to the VL as set forth in SEQ ID NO: 8.

[0349] In some embodiments, the anti-TfR antibody of the present disclosure comprises a humanized VH comprising a CDR-H1 having the amino acid sequence of SEQ ID NO: 150 (according to the Chothia definition system), a CDR-H2 having the amino acid sequence of SEQ ID NO: 151, SEQ ID NO: 270, or SEQ ID NO: 271 (according to the Chothia definition system), a CDR-H3 having the amino acid sequence of SEQ ID NO: 152 (according to the Chothia definition system), and containing no more than 25 amino acid variations (e.g., no more than 25, 24, 23, 22, 21, 20, 19, 18, 17, 16, 15, 14, 13, 12, 11, 10, 9, 8, 7, 6, 5, 4, 3, 2, or 1 amino acid variation) in the framework regions as compared with the VH as set forth in SEQ ID NO: 7. Alternatively or in addition (e.g., in addition), the anti-TfR antibody of the present disclosure comprises a humanized VL comprising a CDR-L1 having the amino acid sequence of SEQ ID NO: 153 (according to the Chothia definition system), a CDR-L2 having the amino acid sequence of SEQ ID NO: 5 (according to the Chothia definition system), and a CDR-L3 having the amino acid sequence of SEQ ID NO: 154 (according to the Chothia definition system), and containing no more than 25 amino acid variations (e.g., no more than 25, 24, 23, 22, 21, 20, 19, 18, 17, 16, 15, 14, 13, 12, 11, 10, 9, 8, 7, 6, 5, 4, 3, 2, or 1 amino acid variation) in the framework regions as compared with the VL as set forth in SEQ ID NO: 8.

[0350] In some embodiments, the anti-TfR antibody of the present disclosure comprises a humanized VH comprising a CDR-H1 having the amino acid sequence of SEQ ID NO: 150 (according to the Chothia definition system), a CDR-H2 having the amino acid sequence of SEQ ID NO: 151, SEQ ID NO: 270, or SEQ ID NO: 271 (according to the Chothia definition system), a CDR-H3 having the amino acid sequence of SEQ ID NO: 152 (according to the Chothia definition system), and is at least 75% (e.g., 75%, 80%, 85%, 90%, 95%, 98%, or 99%) identical in the framework regions to the VH as set forth in SEQ ID NO: 7. Alternatively or in addition (e.g., in addition), the anti-TfR antibody of the present disclosure comprises a humanized VL comprising a CDR-L1 having the amino acid sequence of SEQ ID NO: 153 (according to the Chothia definition system), a CDR-L2 having the amino acid sequence of SEQ ID NO: 5 (according to the Chothia definition system), and a CDR-L3 having the amino acid sequence of SEQ ID NO: 154 (according to the Chothia definition system), and is at least 75% (e.g., 75%, 80%, 85%, 90%, 95%, 98%, or 99%) identical in the framework regions to the VL as set forth in SEQ ID NO: 8.

[0351] In some embodiments, the anti-TfR antibody of the present disclosure comprises a humanized VH comprising a CDR-H1 having the amino acid sequence of SEQ ID NO: 9 (according to the IMGT definition system), a CDR-H2 having the amino acid sequence of SEQ ID NO: 10 (according to the IMGT definition system), a CDR-H3 having the amino acid sequence of SEQ ID NO: 11 (according to the IMGT definition system), and containing no more than 25 amino acid variations (e.g., no more than 25, 24, 23, 22, 21, 20, 19, 18, 17, 16, 15, 14, 13, 12, 11, 10, 9, 8, 7, 6, 5, 4, 3, 2, or 1 amino acid variation) in the framework regions as compared with the VH as set forth in SEQ ID NO: 15. Alternatively or in addition (e.g., in addition), the anti-TfR antibody of the present disclosure comprises a humanized VL comprising a CDR-L1 having the amino acid sequence of SEQ ID NO: 12 (according to the IMGT definition system), a CDR-L2 having the amino acid sequence of SEQ ID NO: 13 (according to the IMGT definition system), and a CDR-L3 having the amino acid sequence of SEQ ID NO: 14 (according to the IMGT definition system), and containing no more than 25 amino acid variations (e.g., no more than 25, 24, 23, 22, 21, 20, 19, 18, 17, 16, 15, 14, 13, 12, 11, 10, 9, 8, 7, 6, 5, 4, 3, 2, or 1 amino acid variation) in the framework regions as compared with the VL as set forth in SEQ ID NO: 16.

[0352] In some embodiments, the anti-TfR antibody of the present disclosure comprises a humanized VH comprising a CDR-H1 having the amino acid sequence of SEQ ID NO: 9 (according to the IMGT definition system), a CDR-H2 having the amino acid sequence of SEQ ID NO: 10 (according to the IMGT definition system), a CDR-H3 having the amino acid sequence of SEQ ID NO: 11 (according to the IMGT definition system), and is at least 75% (e.g., 75%, 80%, 85%, 90%, 95%, 98%, or 99%) identical in the framework regions to the VH as set forth in SEQ ID NO: 15. Alternatively or in addition (e.g., in addition), the anti-TfR antibody of the present disclosure comprises a humanized VL comprising a CDR-L1 having the amino acid sequence of SEQ ID NO: 12 (according to the IMGT definition system), a CDR-L2 having the amino acid sequence of SEQ ID NO: 13 (according to the IMGT definition system), and a CDR-L3 having the amino acid sequence of SEQ ID NO: 14 (according to the IMGT definition system), and is at least 75% (e.g., 75%, 80%, 85%, 90%, 95%, 98%, or 99%) identical in the framework regions to the VL as set forth SEQ ID NO: 16.

[0353] In some embodiments, the anti-TfR antibody of the present disclosure comprises a humanized VH comprising a CDR-H1 having the amino acid sequence of SEQ ID NO: 155 (according to the Kabat definition system), a CDR-H2 having the amino acid sequence of SEQ ID NO: 156 (according to the Kabat definition system), a CDR-H3 having the amino acid sequence of SEQ ID NO: 157 (according to the Kabat definition system), and containing no more than 25 amino acid variations (e.g., no more than 25, 24, 23, 22, 21, 20, 19, 18, 17, 16, 15, 14, 13, 12, 11, 10, 9, 8, 7, 6, 5, 4, 3, 2, or 1 amino acid variation) in the framework regions as compared with the VH as set forth in SEQ ID NO: 15. Alternatively or in addition (e.g., in addition), the anti-TfR antibody of the present disclosure comprises a humanized VL comprising a CDR-L1 having the amino acid sequence of SEQ ID NO: 158 (according to the Kabat definition system), a CDR-L2 having the amino acid sequence of SEQ ID NO: 159 (according to the Kabat definition system), and a CDR-L3 having the amino acid sequence of SEQ ID NO: 14 (according to the Kabat definition system), and containing no more than 25 amino acid variations (e.g., no more than 25, 24, 23, 22, 21, 20, 19, 18, 17, 16, 15, 14, 13, 12, 11, 10, 9, 8, 7, 6, 5, 4, 3, 2, or 1 amino acid variation) in the framework regions as compared with the VL as set forth in SEQ ID NO: 16.

[0354] In some embodiments, the anti-TfR antibody of the present disclosure comprises a humanized VH comprising a CDR-H1 having the amino acid sequence of SEQ ID NO: 155 (according to the Kabat definition system), a CDR-H2 having the amino acid sequence of SEQ ID NO: 156 (according to the Kabat definition system), a CDR-H3 having the amino acid sequence of SEQ ID NO: 157 (according to the Kabat definition system), and is at least 75% (e.g., 75%, 80%, 85%, 90%, 95%, 98%, or 99%) identical in the framework regions to the VH as set forth in SEQ ID NO: 15. Alternatively or in addition (e.g., in addition), the anti-TfR antibody of the present disclosure comprises a humanized VL comprising a CDR-L1 having the amino acid sequence of SEQ ID NO: 158 (according to the Kabat definition system), a CDR-L2 having the amino acid sequence of SEQ ID NO: 159 (according to the Kabat definition system), and a CDR-L3 having the amino acid sequence of SEQ ID NO: 14 (according to the Kabat definition system), and is at least 75% (e.g., 75%, 80%, 85%, 90%, 95%, 98%, or 99%) identical in the framework regions to the VL as set forth in SEQ ID NO: 16.

[0355] In some embodiments, the anti-TfR antibody of the present disclosure comprises a humanized VH comprising a CDR-H1 having the amino acid sequence of SEQ ID NO: 160 (according to the Chothia definition system), a CDR-H2 having the amino acid sequence of SEQ ID NO: 161 (according to the Chothia definition system), a CDR-H3 having the amino acid sequence of SEQ ID NO: 162 (according to the Chothia definition system), and containing no more than 25 amino acid variations (e.g., no more than 25, 24, 23, 22, 21, 20, 19, 18, 17, 16, 15, 14, 13, 12, 11, 10, 9, 8, 7, 6, 5, 4, 3, 2, or 1 amino acid variation) in the framework regions as compared with the VH as set forth in SEQ ID NO: 15. Alternatively or in addition (e.g., in addition), the anti-TfR antibody of the present disclosure comprises a humanized VL comprising a CDR-L1 having the amino acid sequence of SEQ ID NO: 163 (according to the Chothia definition system), a CDR-L2 having the amino acid sequence of SEQ ID NO: 13 (according to the Chothia definition system), and a CDR-L3 having the amino acid sequence of SEQ ID NO: 164 (according to the Chothia definition system), and containing no more than 25 amino acid variations (e.g., no more than 25, 24, 23, 22, 21, 20, 19, 18, 17, 16, 15, 14, 13, 12, 11, 10, 9, 8, 7, 6, 5, 4, 3, 2, or 1 amino acid variation) in the framework regions as compared with the VL as set forth in SEQ ID NO: 16.

[0356] In some embodiments, the anti-TfR antibody of the present disclosure comprises a humanized VH comprising a CDR-H1 having the amino acid sequence of SEQ ID NO: 160 (according to the Chothia definition system), a CDR-H2 having the amino acid sequence of SEQ ID NO: 161 (according to the Chothia definition system), a CDR-H3 having the amino acid sequence of SEQ ID NO: 162 (according to the Chothia definition system), and is at least 75% (e.g., 75%, 80%, 85%, 90%, 95%, 98%, or 99%) identical in the framework regions to the VH as set forth in SEQ ID NO: 15. Alternatively or in addition (e.g., in addition), the anti-TfR antibody of the present disclosure comprises a humanized VL comprising a CDR-L1 having the amino acid sequence of SEQ ID NO: 163 (according to the Chothia definition system), a CDR-L2 having the amino acid sequence of SEQ ID NO: 13 (according to the Chothia definition system), and a CDR-L3 having the amino acid sequence of SEQ ID NO: 164 (according to the Chothia definition system), and is at least 75% (e.g., 75%, 80%, 85%, 90%, 95%, 98%, or 99%) identical in the framework regions to the VL as set forth in SEQ ID NO: 16.

[0357] In some embodiments, the anti-TfR antibody of the present disclosure comprises a humanized VH comprising a CDR-H1 having the amino acid sequence of SEQ ID NO: 17, SEQ ID NO: 266, or SEQ ID NO: 268 (according to the IMGT definition system), a CDR-H2 having the amino acid sequence of SEQ ID NO: 18 (according to the IMGT definition system), a CDR-H3 having the amino acid sequence of SEQ ID NO: 19 (according to the IMGT definition system), and containing no more than 25 amino acid variations (e.g., no more than 25, 24, 23, 22, 21, 20, 19, 18, 17, 16, 15, 14, 13, 12, 11, 10, 9, 8, 7, 6, 5, 4, 3, 2, or 1 amino acid variation) in the framework regions as compared with the VH as set forth in SEQ ID NO: 23. Alternatively or in addition (e.g., in addition), the anti-TfR antibody of the present disclosure comprises a humanized VL comprising a CDR-L1 having the amino acid sequence of SEQ ID NO: 20 (according to the IMGT definition system), a CDR-L2 having the amino acid sequence of SEQ ID NO: 21 (according to the IMGT definition system), and a CDR-L3 having the amino acid sequence of SEQ ID NO: 22 (according to the IMGT definition system), and containing no more than 25 amino acid variations (e.g., no more than 25, 24, 23, 22, 21, 20, 19, 18, 17, 16, 15, 14, 13, 12, 11, 10, 9, 8, 7, 6, 5, 4, 3, 2, or 1 amino acid variation) in the framework regions as compared with the VL as set forth in SEQ ID NO: 24.

[0358] In some embodiments, the anti-TfR antibody of the present disclosure comprises a humanized VH comprising a CDR-H1 having the amino acid sequence of SEQ ID NO: 17, SEQ ID NO: 266, or SEQ ID NO: 268 (according to the IMGT definition system), a CDR-H2 having the amino acid sequence of SEQ ID NO: 18 (according to the IMGT definition system), a CDR-H3 having the amino acid sequence of SEQ ID NO: 19 (according to the IMGT definition system), and is at least 75% (e.g., 75%, 80%, 85%, 90%, 95%, 98%, or 99%) identical in the framework regions to the VH as set forth in SEQ ID NO: 23. Alternatively or in addition (e.g., in addition), the anti-TfR antibody of the present disclosure comprises a humanized VL comprising a CDR-L1 having the amino acid sequence of SEQ ID NO: 20 (according to the IMGT definition system), a CDR-L2 having the amino acid sequence of SEQ ID NO: 21 (according to the IMGT definition system), and a CDR-L3 having the amino acid sequence of SEQ ID NO: 22 (according to the IMGT definition system), and is at least 75% (e.g., 75%, 80%, 85%, 90%, 95%, 98%, or 99%) identical in the framework regions to the VL as set forth in SEQ ID NO: 24.

[0359] In some embodiments, the anti-TfR antibody of the present disclosure comprises a humanized VH comprising a CDR-H1 having the amino acid sequence of SEQ ID NO: 165, SEQ ID NO: 267, or SEQ ID NO: 269 (according to the Kabat definition system), a CDR-H2 having the amino acid sequence of SEQ ID NO: 166 (according to the Kabat definition system), a CDR-H3 having the amino acid sequence of SEQ ID NO: 167 (according to the Kabat definition system), and containing no more than 25 amino acid variations (e.g., no more than 25, 24, 23, 22, 21, 20, 19, 18, 17, 16, 15, 14, 13, 12, 11, 10, 9, 8, 7, 6, 5, 4, 3, 2, or 1 amino acid variation) in the framework regions as compared with the VH as set forth in SEQ ID NO: 23. Alternatively or in addition (e.g., in addition), the anti-TfR antibody of the present disclosure comprises a humanized VL comprising a CDR-L1 having the amino acid sequence of SEQ ID NO: 168 (according to the Kabat definition system), a CDR-L2 having the amino acid sequence of SEQ ID NO: 169 (according to the Kabat definition system), and a CDR-L3 having the amino acid sequence of SEQ ID NO: 22 (according to the Kabat definition system), and containing no more than 25 amino acid variations (e.g., no more than 25, 24, 23, 22, 21, 20, 19, 18, 17, 16, 15, 14, 13, 12, 11, 10, 9, 8, 7, 6, 5, 4, 3, 2, or 1 amino acid variation) in the framework regions as compared with the VL as set forth in SEQ ID NO: 24.

[0360] In some embodiments, the anti-TfR antibody of the present disclosure comprises a humanized VH comprising a CDR-H1 having the amino acid sequence of SEQ ID NO: 165, SEQ ID NO: 267, or SEQ ID NO: 269 (according to the Kabat definition system), a CDR-H2 having the amino acid sequence of SEQ ID NO: 166 (according to the Kabat definition system), a CDR-H3 having the amino acid sequence of SEQ ID NO: 167 (according to the Kabat definition system), and is at least 75% (e.g., 75%, 80%, 85%, 90%, 95%, 98%, or 99%) identical in the framework regions to the VH as set forth in SEQ ID NO: 23. Alternatively or in addition (e.g., in addition), the anti-TfR antibody of the present disclosure comprises a humanized VL comprising a CDR-L1 having the amino acid sequence of SEQ ID NO: 168 (according to the Kabat definition system), a CDR-L2 having the amino acid sequence of SEQ ID NO: 169 (according to the Kabat definition system), and a CDR-L3 having the amino acid sequence of SEQ ID NO: 22 (according to the Kabat definition system), and is at least 75% (e.g., 75%, 80%, 85%, 90%, 95%, 98%, or 99%) identical in the framework regions to the VL as set forth in SEQ ID NO: 24.

[0361] In some embodiments, the anti-TfR antibody of the present disclosure comprises a humanized VH comprising a CDR-H1 having the amino acid sequence of SEQ ID NO: 170 (according to the Chothia definition system), a CDR-H2 having the amino acid sequence of SEQ ID NO: 171 (according to the Chothia definition system), a CDR-H3 having the amino acid sequence of SEQ ID NO: 172 (according to the Chothia definition system), and containing no more than 25 amino acid variations (e.g., no more than 25, 24, 23, 22, 21, 20, 19, 18, 17, 16, 15, 14, 13, 12, 11, 10, 9, 8, 7, 6, 5, 4, 3, 2, or 1 amino acid variation) in the framework regions as compared with the VH as set forth in SEQ ID NO: 23. Alternatively or in addition (e.g., in addition), the anti-TfR antibody of the present disclosure comprises a humanized VL comprising a CDR-L1 having the amino acid sequence of SEQ ID NO: 173 (according to the Chothia definition system), a CDR-L2 having the amino acid sequence of SEQ ID NO: 21 (according to the Chothia definition system), and a CDR-L3 having the amino acid sequence of SEQ ID NO: 174 (according to the Chothia definition system), and containing no more than 25 amino acid variations (e.g., no more than 25, 24, 23, 22, 21, 20, 19, 18, 17, 16, 15, 14, 13, 12, 11, 10, 9, 8, 7, 6, 5, 4, 3, 2, or 1 amino acid variation) in the framework regions as compared with the VL as set forth in SEQ ID NO: 24.

[0362] In some embodiments, the anti-TfR antibody of the present disclosure comprises a humanized VH comprising a CDR-H1 having the amino acid sequence of SEQ ID NO: 170 (according to the Chothia definition system), a CDR-H2 having the amino acid sequence of SEQ ID NO: 171 (according to the Chothia definition system), a CDR-H3 having the amino acid sequence of SEQ ID NO: 172 (according to the Chothia definition system), and is at least 75% (e.g., 75%, 80%, 85%, 90%, 95%, 98%, or 99%) identical in the framework regions to the VH as set forth in SEQ ID NO: 23. Alternatively or in addition (e.g., in addition), the anti-TfR antibody of the present disclosure comprises a humanized VL comprising a CDR-L1 having the amino acid sequence of SEQ ID NO: 173 (according to the Chothia definition system), a CDR-L2 having the amino acid sequence of SEQ ID NO: 21 (according to the Chothia definition system), and a CDR-L3 having the amino acid sequence of SEQ ID NO: 174 (according to the Chothia definition system), and is at least 75% (e.g., 75%, 80%, 85%, 90%, 95%, 98%, or 99%) identical in the framework regions to the VL as set forth in SEQ ID NO: 24.

[0363] In some embodiments, the anti-TfR antibody of the present disclosure is a chimeric antibody, which can include a heavy constant region and a light constant region from a human antibody. Chimeric antibodies refer to antibodies having a variable region or part of variable region from a first species and a constant region from a second species. Typically, in these chimeric antibodies, the variable region of both light and heavy chains mimics the variable regions of antibodies derived from one species of mammals (e.g., a non-human mammal such as mouse, rabbit, and rat), while the constant portions are homologous to the sequences in antibodies derived from another mammal such as human. In some embodiments, amino acid modifications can be made in the variable region and/or (e.g., and) the constant region.

[0364] In some embodiments, the anti-TfR antibody described herein is a chimeric antibody, which can include a heavy constant region and a light constant region from a human antibody. Chimeric antibodies refer to antibodies having a variable region or part of variable region from a first species and a constant region from a second species. Typically, in these chimeric antibodies, the variable region of both light and heavy chains mimics the variable regions of antibodies derived from one species of mammals (e.g., a non-human mammal such as mouse, rabbit, and rat), while the constant portions are homologous to the sequences in antibodies derived from another mammal such as human. In some embodiments, amino acid modifications can be made in the variable region and/or (e.g., and) the constant region.

[0365] In some embodiments, the heavy chain of any of the anti-TfR antibodies as described herein may comprises a heavy chain constant region (CH) or a portion thereof (e.g., CH1, CH2, CH3, or a combination thereof). The heavy chain constant region can of any suitable origin, e.g., human, mouse, rat, or rabbit. In one specific example, the heavy chain constant region is from a human IgG (a gamma heavy chain), e.g., IgG1, IgG2, or IgG4. An example of a human IgG 1 constant region is given below:

ASTKGPSVFPLAPSSKSTSGGTAALGCLVKDYFPEPVTVSWNSGALTSGV
HTFPAVLQSSGLYSLSSVVTVPSSSLGTQTYICNVNHKPSNTKVDKKVEP
KSCDKTHTCPPCPAPELLGGPSVFLFPPKPKDTLMISRTPEVTCVVVDVS
HEDPEVKFNWYVDGVEVHNAKTKPREEQYNSTYRVVSVLTVLHQDWLNGK
EYKCKVSNKALPAPIEKTISKAKGQPREPQVYTLPPSRDELTKNQVSLTC
LVKGFYPSDIAVEWESNGQPENNYKTTPPVLDSDGSFFLYSKLTVDKSRW
QQGNVFSCSVMHEALHNHYTQKSLSLSPGK (SEQ ID NO: 175)

[0366] In some embodiments, the heavy chain of any of the anti-TfR antibodies described herein comprises a mutant human IgG1 constant region. For example, the introduction of LALA mutations (a mutant derived from mAb b12 that has been mutated to replace the lower hinge residues Leu234 Leu235 with Ala234 and Ala235) in the CH2 domain of human IgG1 is known to reduce Fcg receptor binding (Bruhns, P., et al. (2009) and Xu, D. et al. (2000)). The mutant human IgG1 constant region is provided below (mutations bonded and underlined):

ASTKGPSVFPLAPSSKSTSGGTAALGCLVKDYFPEPVTVSWNSGALTSGV
HTFPAVLQSSGLYSLSSVVTVPSSSLGTQTYICNVNHKPSNTKVDKKVEP
KSCDKTHTCPPCPAPEAAGGPSVFLFPPKPKDTLMISRTPEVTCVVVDVS
HEDPEVKFNWYVDGVEVHNAKTKPREEQYNSTYRVVSVLTVLHQDWLNGK
EYKCKVSNKALPAPIEKTISKAKGQPREPQVYTLPPSRDELTKNQVSLTC
LVKGFYPSDIAVEWESNGQPENNYKTTPPVLDSDGSFFLYSKLTVDKSRW
QQGNVFSCSVMHEALHNHYTQKSLSLSPGK (SEQ ID NO: 176)

[0367] In some embodiments, the light chain of any of the anti-TfR antibodies described herein may further comprise a light chain constant region (CL), which can be any CL known in the art. In some examples, the CL is a kappa light chain. In other examples, the CL is a lambda light chain. In some embodiments, the CL is a kappa light chain, the sequence of which is provided below:

RTVAAPSVFIFPPSDEQLKSGTASVVCLLNNFYPREAKVQWKVDNALQSG
NSQESVTEQDSKDSTYSLSSTLTLSKADYEKHKVYACEVTHQGLSSPVTK
SFNRGEC (SEQ ID NO:177)

[0368] Other antibody heavy and light chain constant regions are well known in the art, e.g., those provided in the IMGT database (www.imgt.org) or at www.vbase2.org/vbstat.php., both of which are incorporated by reference herein.

[0369] In some embodiments, the anti-TfR antibody described herein comprises a heavy chain comprising any one of the VH as listed in Table 2 or any variants thereof and a heavy chain constant region that is at least 80%, at least 85%, at least 90%, at least 95%, or at least 99% identical to SEQ ID NO: 175 or SEQ ID NO: 176. In some embodiments, the anti-TfR antibody described herein comprises a heavy chain comprising any one of the VH as listed in Table 2 or any variants thereof and a heavy chain constant region that contains no more than 25 amino acid variations (e.g., no more than 25, 24, 23, 22, 21, 20, 19, 18, 17, 16, 15, 14, 13, 12, 11, 10, 9, 8, 7, 6, 5, 4, 3, 2, or 1 amino acid variation) as compared with SEQ ID NO: 175 or SEQ ID NO: 176. In some embodiments, the anti-TfR antibody described herein comprises a heavy chain comprising any one of the VH as listed in Table 2 or any variants thereof and a heavy chain constant region as set forth in SEQ ID NO: 175. In some embodiments, the anti-TfR antibody described herein comprises heavy chain comprising any one of the VH as listed in Table 2 or any variants thereof and a heavy chain constant region as set forth in SEQ ID NO: 176.

[0370] In some embodiments, the anti-TfR antibody described herein comprises a light chain comprising any one of the VL as listed in Table 2 or any variants thereof and a light chain constant region that is at least 80%, at least 85%, at least 90%, at least 95%, or at least 99% identical to SEQ ID NO: 177. In some embodiments, the anti-TfR antibody described herein comprises a light chain comprising any one of the VL as listed in Table 2 or any variants thereof and a light chain constant region contains no more than 25 amino acid variations (e.g., no more than 25, 24, 23, 22, 21, 20, 19, 18, 17, 16, 15, 14, 13, 12, 11, 10, 9, 8, 7, 6, 5, 4, 3, 2, or 1 amino acid variation) as compared with SEQ ID NO: 177. In some embodiments, the anti-TfR antibody described herein comprises a light chain comprising any one of the VL as listed in Table 2 or any variants thereof and a light chain constant region set forth in SEQ ID NO: 177.

[0371] Examples of IgG heavy chain and light chain amino acid sequences of the anti-TfR antibodies described are provided in Table 5 below.

TABLE 5

Heavy chain and light chain sequences of examples of anti-TfR IgGs

| Antibody | IgG Heavy Chain/Light Chain Sequences |
|---|---|
| 3-A4 | Heavy Chain (with wild type human IgG1 constant region) |
| | EVQLQQSGAELVRPGASVKLSCTASGFNIKDDYMYWVKQRPEQGLEWIGWIDPENGDTEYASKFQDKATVTADTSSNTAYLQLSSLTSEDTAVYYCTLWLRRGLDYWGQGTSVTVSSASTKGPSVFPLAPSSKSTSGGTAALGCLVKDYFPEPVTVSWNSGALTSGVHTFPAVLQSSGLYSLSSVVTVPSSSLGTQTYICNVNHKPSNTKVDKKVEPKSCDKTHTCPPCPAPELLGGPSVFLFPPKPKDTLMISRTPEVTCVVVDVSHEDPEVKFNWYVDGVEVHNAKTKPREEQYNSTYRVVSVLTVLHQDWLNGKEYKCKVSNKALPAPIEKTISKAKGQPREPQVYTLPPSRDELTKNQVSLTCLVKGFYPSDIAVEWESNGQPENNYKTTPPVLDSDGSFFLYSKLTVDKSRWQQGNVFSCSVMHEALHNHYTQKSLSLSPGK (SEQ ID NO: 178) |
| | Light Chain (with kappa light chain constant region) |
| | DIVMTQAAPSVPVTPGESVSISCRSSKSLLHSNGYTYLFWFLQRPGQSPQLLIYRMSNLASGVPDRFSGSGSGTAFTLRISRVEAEDVGVYYCMQHLEYPFTFGGGTKIEIKRTVAAPSVFIFPPSDEQLKSGTASVVCLLNNFYPREAKVQWKVDNALQSGNSQESVTEQDSKDSTYSLSSTLTLSKADYEKHKVYACEVTHQGLSSPVTKSFNRGEC (SEQ ID NO: 179) |
| 3-A4 Variant 1 | Heavy Chain (with wild type human IgG1 constant region) |
| | EVQLQQSGAELVRPGASVKLSCTASGFNIKDDYMYWVKQRPEQGLEWIGWIDPETGDTEYASKFQDKATVTADTSSNTAYLQLSSLTSEDTAVYYCTLWLRRGLDYWGQGTSVTVSSASTKGPSVFPLAPSSKSTSGGTAALGCLVKDYFPEPVTVSWNSGALTSGVHTFPAVLQSSGLYSLSSVVTVPSSSLGTQTYICNVNHKPSNTKVDKKVEPKSCDKTHTCPPCPAPELLGGPSVFLFPPKPKDTLMISRTPEVTCVVVDVSHEDPEVKFNWYVDGVEVHNAKTKPREEQYNSTYRVVSVLTVLHQDWLNGKEYKCKVSNKALPAPIEKTISKAKGQPREPQVYTLPPSRDELTKNQVSLTCLVKGFYPSDIAVEWESNGQPENNYKTTPPVLDSDGSFFLYSKLTVDKSRWQQGNVFSCSVMHEALHNHYTQKSLSLSPGK (SEQ ID NO: 300) |
| | Light Chain (with kappa light chain constant region) |
| | DIVMTQAAPSVPVTPGESVSISCRSSKSLLHSNGYTYLFWFLQRPGQSPQLLIYRMSNLASGVPDRFSGSGSGTAFTLRISRVEAEDVGVYYCMQHLEYPFTFGGGTKIEIKRTVAAPSVFIFPPSDEQLKSGTASVVCLLNNFYPREAKVQWKVDNALQSGNSQESVTEQDSKDSTYSLSSTLTLSKADYEKHKVYACEVTHQGLSSPVTKSFNRGEC (SEQ ID NO: 179) |
| 3-A4 Variant 2 | Heavy Chain (with wild type human IgG1 constant region) |
| | EVQLQQSGAELVRPGASVKLSCTASGFNIKDDYMYWVKQRPEQGLEWIGWIDPESGDTEYASKFQDKATVTADTSSNTAYLQLSSLTSEDTAVYYCTLWLRRGLDYWGQGTSVTVSSASTKGPSVFPLAPSSKSTSGGTAALGCLVKDYFPEPVTVSWNSGALTSGVHTFPAVLQSSGLYSLSSVVTVPSSSLGTQTYICNVNHKPSNTKVDKKVEPKSCDKTHTCPPCPAPELLGGPSVFLFPPKPKDTLMISRTPEVTCVVVDVSHEDPEVKFNWYVDGVEVHNAKTKPREEQYNSTYRVVSVLTVLHQDWLNGKEYKCKVSNKALPAPIEKTISKAKGQPREPQVYTLPPSRDELTKNQVSLTCLVKGFYPSDIAVEWESNGQPENNYKTTPPVLDSDGSFFLYSKLTVDKSRWQQGNVFSCSVMHEALHNHYTQKSLSLSPGK (SEQ ID NO: 301) |
| | Light Chain (with kappa light chain constant region) |
| | DIVMTQAAPSVPVTPGESVSISCRSSKSLLHSNGYTYLFWFLQRPGQSPQLLIYRMSNLASGVPDRFSGSGSGTAFTLRISRVEAEDVGVYYCMQHLEYPFTFGGGTKIEIKRTVAAPSVFIFPPSDEQLKSGTASVVCLLNNFYPREAKVQWKVDNALQSGNSQESVTEQDSKDSTYSLSSTLTLSKADYEKHKVYACEVTHQGLSSPVTKSFNRGEC (SEQ ID NO: 179) |
| 3-M12 | Heavy Chain (with wild type human IgG1 constant region) |
| | DVQLQESGPGLVKPSQSLSLTCSVTGYSITSGYYWNWIRQFPGNKLEWMGYITFDGANNYNPSLKNRISITRDTSKNQFFLKLTSVTTEDTATYYCTRSSYDYDVLDYWGQGTTLTVSSASTKGPSVFPLAPSSKSTSGGTAALGCLVKDYFPEPVTVSWNSGALTSGVHTFPAVLQSSGLYSLSSVVTVPSSSLGTQTYICNVNHKPSNTKVDKKVEPKSCDKTHTCPPCPAPELLGGPSVFLFPPKPKDTLMISRTPEVTCVVVDVSHEDPEVKFNWYVDGVEVHNAKTKPREEQYNSTYRVVSVLTVLHQDWLNGKEYKCKVSNKALPAPIEKTISKAKGQPREPQVYTLPPSRDELTKNQVSLTCLVKGFYPSDIAVEWESNGQPENNYKTTPPVLDSDGSFFLYSKLTVDKSRWQQGNVFSCSVMHEALHNHYTQKSLSLSPGK (SEQ ID NO: 180) |
| | Light Chain (with kappa light chain constant region) |
| | DIMTQTTSSLSASLGDRVTISCRASODISNFLNWYOORPDGTVKLLIYYTSRLHSGVPSRFSGSGSGTDFSLTVSNLEQEDIATYFCQQGHTLPYTFGGGTKLEIKRTVAAPSVFIFPPSDEQLKSGTASVVCLLNNFYPREAKVQWKVDNALQSGNSQESVTEQDSKDSTYSLSSTLTLSKADYEKHKVYACEVTHQGLSSPVTKSFNRGEC (SEQ ID NO: 181) |
| 5–H12 | Heavy Chain (with wild type human IgG1 constant region) |
| | QIOLQQSGPELVRPGASVKISCKASGYSFTDYCINWVNQRPGQGLEWIGWIYPGSGNTRYSERFKGKATLTVDTSSNTAYMQLSSLTSEDSAVYFCAREDYYPYHGMDYWGQGTSVTVSSASTKGPSVFPLAPSSKSTSGGTAALGCLVKDYFPEPVTVSWNSGALTSGVHTFPAVLQSSGLYSLSSVVTVPSSSLGTQTYICNVNHKPSNTKVDKKVEPKSCDKTHTCPPCPAPELLGGPSVFLFPPKPKDTLMISRTPEVTCVVVDVSHEDPEVKFNWYVDGVEVHNAKTKPREEQYNSTYRVVSVLTVLHQDWLNGKEYKCKVSNKALPAPIEKTISKAKGQPREPQVYTLPPSRDELTKNQVSLTCLVKGFYPSDIAVEWESNGQPENNYKTTPPVLDSDGSFFLYSKLTVDKSRWQQGNVFSCSVMHEALHNHYTQKSLSLSPGK (SEQ ID NO: 182) |
| | Light Chain (with kappa light chain constant region) |
| | DIVLTQSPTSLAVSLGQRATISCRASESVDGYDNSFMHWYQQKPGQPPKLLIFRASNLESGIPARFSGSGSRTDFTLTINPVEAADVATYYCQQSSEDPWTFGGGTKLEIKRTVAAPSVFIFPPSDEQLKSGTASVVCLLNNFYPREAKVQWKVDNALQSGNSQESVTEQDSKDSTYSLSSTLTLSKADYEKHKVYACEVTHQGLSSPVTKSFNRGEC (SEQ ID NO: 183) |
| 5-H12 Variant 1 | Heavy Chain (with wild type human IgG1 constant region) |
| | QIOLQQSGPELVRPGASVKISCKASGYSFTDYYINWVNQRPGQGLEWIGWIYPGSGNTRYSERFKGKATLTVDTSSNTAYMQLSSLTSEDSAVYFCAREDYYPYHGMDYWGQGTSVTVSSASTKGPSVFPLAPSSKSTSGGTAALGCLVKDYFPEPVTVSWNSGALTSGVHTFPAVLQSSGLYSLSSVVTVPSSSLGTQTYICNVNHKPSNTKVDKKVEPKSCDKTHTCPPCPAPELLGGPSVFLFPPKPKDTLMISRTPEVTCVVVDVSHEDPEVKFNWYVDGVEVHNAKTKPREEQYNSTYRVVSVLTVLHQDWLNGKEYKCKVSNKALPAPIEKTISKAKGQPREPQVYTLPPSRDELTKNQVSLTCLVKGFYPSDIAVEWESNGQPENNYKTTPPVLDSDGSFFLYSKLTVDKSRWQQGNVFSCSVMHEALHNHYTQKSLSLSPGK (SEQ ID NO: 302) |
| | Light Chain (with kappa light chain constant region) |
| | DIVLTQSPTSLAVSLGQRATISCRASESVDGYDNSFMHWYQQKPGQPPKLLIFRASNLESGIPARFSGSGSRTDFTLTINPVEAADVATYYCQQSSEDPWTFGGGTKLEIKRTVAAPSVFIFPPSDEQLKSGTASVVCLLNNFYPREAKVQWKVDNALQSGNSQESVTEQDSKDSTYSLSSTLTLSKADYEKHKVYACEVTHQGLSSPVTKSFNRGEC (SEQ ID NO: 183) |
| 5-H12 Variant 2 | Heavy Chain (with wild type human IgG1 constant region) |
| | QIQLQQSGPELVRPGASVKISCKASGYSFTDYDINWVNQRPGQGLEWIGWIYPGSGNTRYSERFKGKATLTVDTSSNTAYMQLSSLTSEDSAVYFCAREDYYPYHGMDYWGQGTSVTVSSASTKGPSVFPLAPSSKSTSGGTAALGCLVKDYFPEPVTVSWNSGALTSGVHTFPAVLQSSGLYSLSSVVTVPSSSLGTQTYICNVNHKPSNTKVDKKVEPKSCDKTHTCPPCPAPELLGGPSVFLFPPKPKDTLMISRTPEVTCVVVDVSHEDPEVKFNWYVDGVEVHNAKTKPREEQYNSTYRVVSVLTVLHQDWLNGKEYKCKVSNKALPAPIEKTISKAKGQPREPQVYTLPPSRDELTKNQVSLTCLVKGFYPSDIAVEWESNGQPENNYKTTPPVLDSDGSFFLYSKLTVDKSRWQQGNVFSCSVMHEALHNHYTQKSLSLSPGK (SEQ ID NO: 303) |
| | Light Chain (with kappa light chain constant region) |
| | DIVLTQSPTSLAVSLGQRATISCRASESVDGYDNSFMHWYQQKPGQPPKLLIFRASNLESGIPARFSGSGSRTDFTLTINPVEAADVATYYCQQSSEDPWTFGGGTKLEIKRTVAAPSVFIFPPSDEQLKSGTASVVCLLNNFYPREAKVQWKVDNALQSGNSQESVTEQDSKDSTYSLSSTLTLSKADYEKHKVYACEVTHQGLSSPVTKSFNRGEC (SEQ ID NO: 183) |

* VH/VL sequences underlined

[0372] In some embodiments, the anti-TfR antibody of the present disclosure comprises a heavy chain containing no more than 25 amino acid variations (e.g., no more than 25, 24, 23, 22, 21, 20, 19, 18, 17, 16, 15, 14, 13, 12, 11, 10, 9, 8, 7, 6, 5, 4, 3, 2, or 1 amino acid variation) as compared with the heavy chain as set forth in SEQ ID NO: 178, SEQ ID NO: 180, SEQ ID NO: 182, SEQ ID NO: 300, SEQ ID NO: 301, SEQ ID NO: 302, or SEQ ID NO: 303. Alternatively or in addition (e.g., in addition), the anti-TfR antibody of the present disclosure comprises a light chain containing no more than 25 amino acid variations (e.g., no more than 25, 24, 23, 22, 21, 20, 19, 18, 17, 16, 15, 14, 13, 12, 11, 10, 9, 8, 7, 6, 5, 4, 3, 2, or 1 amino acid variation) as compared with the light chain as set forth in SEQ ID NO: 179, SEQ ID NO: 181, or SEQ ID NO: 183. In some embodiments, the anti-TfR antibody described herein comprises a heavy chain comprising an amino acid sequence that is at least 75% (e.g., 75%, 80%, 85%, 90%, 95%, 98%, or 99%) identical to SEQ ID NO: 178, SEQ ID NO: 180, SEQ ID NO: 182, SEQ ID NO: 300, SEQ ID NO: 301, SEQ ID NO: 302, or SEQ ID NO: 303. Alternatively or in addition (e.g., in addition), the anti-TfR antibody described herein comprises a light chain comprising an amino acid sequence that is at least 75% (e.g., 75%, 80%, 85%, 90%, 95%, 98%, or 99%) identical to SEQ ID NO: 179, SEQ ID NO: 181, or SEQ ID NO: 183. In some embodiments, the anti-TfR antibody described herein comprises a heavy chain comprising the amino acid sequence of SEQ ID NO: 178, SEQ ID NO: 180, SEQ ID NO: 182, SEQ ID NO: 300, SEQ ID NO: 301, SEQ ID NO: 302, or SEQ ID NO: 303. Alternatively or in addition (e.g., in addition), the anti-TfR antibody described herein comprises a light chain comprising the amino acid sequence of SEQ ID NO: 179, SEQ ID NO: 181, or SEQ ID NO: 183.

[0373] In some embodiments, the anti-TfR antibody of the present disclosure comprises a heavy chain containing no more than 25 amino acid variations (e.g., no more than 25, 24, 23, 22, 21, 20, 19, 18, 17, 16, 15, 14, 13, 12, 11, 10, 9, 8, 7, 6, 5, 4, 3, 2, or 1 amino acid variation) as compared with the heavy chain as set forth in SEQ ID NO: 178, SEQ ID NO: 300, or SEQ ID NO: 301. Alternatively or in addition (e.g., in addition), the anti-TfR antibody of the present disclosure comprises a light chain containing no more than 25 amino acid variations (e.g., no more than 25, 24, 23, 22, 21, 20, 19, 18, 17, 16, 15, 14, 13, 12, 10, 11, 9, 8, 7, 6, 5, 4, 3, 2, or 1 amino acid variation) as compared with the light chain as set forth in SEQ ID NO: 179. In some embodiments, the anti-TfR antibody described herein comprises a heavy chain comprising an amino acid sequence that is at least 75% (e.g., 75%, 80%, 85%, 90%, 95%, 98%, or 99%) identical to SEQ ID NO: 178, SEQ ID NO: 300, or SEQ ID NO: 301. Alternatively or in addition (e.g., in addition), the anti-TfR antibody described herein comprises a light chain comprising an amino acid sequence that is at least 75% (e.g., 75%, 80%, 85%, 90%, 95%, 98%, or 99%) identical to SEQ ID NO: 179. In some embodiments, the anti-TfR antibody described herein comprises a heavy chain comprising the amino acid sequence of SEQ ID NO: 178, SEQ ID NO: 300, or SEQ ID NO: 301. Alternatively or in addition (e.g., in addition), the anti-TfR antibody described herein comprises a light chain comprising the amino acid sequence of SEQ ID NO: 179.

[0374] In some embodiments, the anti-TfR antibody of the present disclosure comprises a heavy chain containing no more than 25 amino acid variations (e.g., no more than 25, 24, 23, 22, 21, 20, 19, 18, 17, 16, 15, 14, 13, 12, 11, 10, 9, 8, 7, 6, 5, 4, 3, 2, or 1 amino acid variation) as compared with the heavy chain as set forth in SEQ ID NO: 180. Alternatively or in addition (e.g., in addition), the anti-TfR antibody of the present disclosure comprises a light chain containing no more than 25 amino acid variations (e.g., no more than 25, 24, 23, 22, 21, 20, 19, 18, 17, 16, 15, 14, 13, 12, 11, 10, 9, 8, 7, 6, 5, 4, 3, 2, or 1 amino acid variation) as compared with the light chain as set forth in SEQ ID NO: 181. In some embodiments, the anti-TfR antibody described herein comprises a heavy chain comprising an amino acid sequence that is at least 75% (e.g., 75%, 80%, 85%, 90%, 95%, 98%, or 99%) identical to SEQ ID NO: 180. Alternatively or in addition (e.g., in addition), the anti-TfR antibody described herein comprises a light chain comprising an amino acid sequence that is at least 75% (e.g., 75%, 80%, 85%, 90%, 95%, 98%, or 99%) identical to SEQ ID NO: 181. In some embodiments, the anti-TfR antibody described herein comprises a heavy chain comprising the amino acid sequence of SEQ ID NO: 180. Alternatively or in addition (e.g., in addition), the anti-TfR antibody described herein comprises a light chain comprising the amino acid sequence of SEQ ID NO: 181.

[0375] In some embodiments, the anti-TfR antibody of the present disclosure comprises a heavy chain containing no more than 25 amino acid variations (e.g., no more than 25, 24, 23, 22, 21, 20, 19, 18, 17, 16, 15, 14, 13, 12, 11, 10, 9, 8, 7, 6, 5, 4, 3, 2, or 1 amino acid variation) as compared with the heavy chain as set forth in SEQ ID NO: 182, SEQ ID NO: 302 or SEQ ID NO: 303. Alternatively or in addition (e.g., in addition), the anti-TfR antibody of the present disclosure comprises a light chain containing no more than 25 amino acid variations (e.g., no more than 25, 24, 23, 22, 21, 20, 19, 18, 17, 16, 15, 14, 13, 12, 11, 10, 9, 8, 7, 6, 5, 4, 3, 2, or 1 amino acid variation) as compared with the light chain as set forth in SEQ ID NO: 183. In some embodiments, the anti-TfR antibody described herein comprises a heavy chain comprising an amino acid sequence that is at least 75% (e.g., 75%, 80%, 85%, 90%, 95%, 98%, or 99%) identical to SEQ ID NO: 182, SEQ ID NO: 302 or SEQ ID NO: 303. Alternatively or in addition (e.g., in addition), the anti-TfR antibody described herein comprises a light chain comprising an amino acid sequence that is at least 75% (e.g., 75%, 80%, 85%, 90%, 95%, 98%, or 99%) identical to SEQ ID NO: 183. In some embodiments, the anti-TfR antibody described herein comprises a heavy chain comprising the amino acid sequence of SEQ ID NO: 182, SEQ ID NO: 302 or SEQ ID NO: 303. Alternatively or in addition (e.g., in addition), the anti-TfR antibody described herein comprises a light chain comprising the amino acid sequence of SEQ ID NO: 183.

[0376] In some embodiments, the anti-TfR antibody is a FAB fragment, F(ab′) fragment, or F(ab′)₂ fragment of an intact antibody (full-length antibody). Antigen binding fragment of an intact antibody (full-length antibody) can be prepared via routine methods (e.g., recombinantly or by digesting the heavy chain constant region of a full length IgG using an enzyme such as papain). For example, F(ab′)₂ fragments can be produced by pepsin or papain digestion of an antibody molecule, and Fab fragments that can be generated by reducing the disulfide bridges of F(ab′)₂ fragments. In some embodiments, a heavy chain constant region in a F(ab′) fragment of the anti-TfRl antibody described herein comprises the amino acid sequence of:

ASTKGPSVFPLAPSSKSTSGGTAALGCLVKDYFPEPVTVSWNSGALTSGV
HTFPAVLQSSGLYSLSSVVTVPSSSLGTQTYICNVNHKPSNTKVDKKVEP
KSCDKTHT (SEQ ID NO: 184)

[0377] In some embodiments, the anti-TfR antibody described herein comprises a heavy chain comprising any one of the VH as listed in Table 2 or any variants thereof and a heavy chain constant region that is at least 80%, at least 85%, at least 90%, at least 95%, or at least 99% identical to SEQ ID NO: 184. In some embodiments, the anti-TfR antibody described herein comprises a heavy chain comprising any one of the VH as listed in Table 2 or any variants thereof and a heavy chain constant region that contains no more than 25 amino acid variations (e.g., no more than 25, 24, 23, 22, 21, 20, 19, 18, 17, 16, 15, 14, 13, 12, 11, 10, 9, 8, 7, 6, 5, 4, 3, 2, or 1 amino acid variation) as compared with SEQ ID NO: 184. In some embodiments, the anti-TfR antibody described herein comprises a heavy chain comprising any one of the VH as listed in Table 2 or any variants thereof and a heavy chain constant region as set forth in SEQ ID NO: 184.

[0378] Examples of F(ab′) amino acid sequences of the anti-TfR antibodies described herein are provided in Table 6.

TABLE 6

Heavy chain and light chain sequences of examples of anti-TfR F(ab′)

| Antibody | F(ab′) Heavy Chain/Light Chain Sequences |
|---|---|
| 3-A4 | Heavy Chain (with partial human IgG1 constant region) |
| | EVQLQQSGAELVRPGASVKLSCTASGFNIKDDYMYWVKQRPEQGLEWIGWIDPENGDTEYASKFQDKATVTADTSSNTAYLQLSSLTSEDTAVYYCTLWLRRGLDYWGQGTSVTVSSASTKGPSVFPLAPSSKSTSGGTAALGCLVKDYFPEPVTVSWNSGALTSGVHTFPAVLQSSGLYSLSSVVTVPSSSLGTQTYICNVNHKPSNTKVDKKVEPKSCDKTHT (SEQ ID NO: 185) |
| | Light Chain (with kappa light chain constant region) |
| | DIVMTQAAPSVPVTPGESVSISCRSSKSLLHSNGYTYLFWFLQRPGQSPQLLIYRMSNLASGVPDRFSGSGSGTAFTLRISRVEAEDVGVYYCMQHLEYPFTFGGGTKTEIKRTVAAPSVFIFPPSDEQLKSGTASVVCLLNNFYPREAKVQWKVDNALQSGNSQESVTEQDSKDSTYSLSSTLTLSKADYEKHKVYACEVTHQGLSSPVTKSFNRGEC (SEQ ID NO: 179) |
| 3-A4 Variant 1 | Heavy Chain (with partial human IgG1 constant region) |
| | EVQLQQSGAELVRPGASVKLSCTASGFNIKDDYMYWVKQRPEQGLEWIGWIDPETGDTEYASKFQDKATVTADTSSNTAYLQLSSLTSEDTAVYYCTLWLRRGLDYWGQGTSVTVSSASTKGPSVFPLAPSSKSTSGGTAALGCLVKDYFPEPVTVSWNSGALTSGVHTFPAVLQSSGLYSLSSVVTVPSSSLGTQTYICNVNHKPSNTKVDKKVEPKSCDKTHT (SEQ ID NO: 304) |
| | Light Chain (with kappa light chain constant region) |
| | DIVMTQAAPSVPVTPGESVSISCRSSKSLLHSNGYTYLFWFLQRPGQSPQLLIYRMSNLASGVPDRFSGSGSGTAFTLRISRVEAEDVGVYYCMQHLEYPFTFGGGTKTEIKRTVAAPSVFIFPPSDEQLKSGTASVVCLLNNFYPREAKVQWKVDNALQSGNSQESVTEQDSKDSTYSLSSTLTLSKADYEKHKVYACEVTHQGLSSPVTKSFNRGEC (SEQ ID NO: 179) |
| 3-A4 Variant 2 | Heavy Chain (with partial human IgG1 constant region) |
| | EVQLQQSGAELVRPGASVKLSCTASGFNIKDDYMYWVKQRPEQGLEWIGWIDPESGDTEYASKFQDKATVTADTSSNTAYLQLSSLTSEDTAVYYCTLWLRRGLDYWGQGTSVTVSSASTKGPSVFPLAPSSKSTSGGTAALGCLVKDYFPEPVTVSWNSGALTSGVHTFPAVLQSSGLYSLSSVVTVPSSSLGTQTYICNVNHKPSNTKVDKKVEPKSCDKTHT (SEQ ID NO: 305) |
| | Light Chain (with kappa light chain constant region) |
| | DIVMTQAAPSVPVTPGESVSISCRSSKSLLHSNGYTYLFWFLQRPGQSPQLLIYRMSNLASGVPDRFSGSGSGTAFTLRISRVEAEDVGVYYCMQHLEYPFTFGGGTKTEIKRTVAAPSVFIFPPSDEQLKSGTASVVCLLNNFYPREAKVQWKVDNALQSGNSQESVTEQDSKDSTYSLSSTLTLSKADYEKHKVYACEVTHQGLSSPVTKSFNRGEC (SEQ ID NO: 179) |
| 3-M12 | Heavy Chain (with partial human IgG1 constant region) |
| | DVQLQESGPGLVKPSQSLSLTCSVTGYSITSGYYWNWIRQFPGNKLEWMGYITFDGANNYNPSLKNRISITRDTSKNQFFLKLTSVTTEDTATYYCTRSSYDYDVLDYWGQGTTLTVSSASTKGPSVFPLAPSSKSTSGGTAALGCLVKDYFPEPVTVSWNSGALTSGVHTFPAVLQSSGLYSLSSVVTVPSSSLGTQTYICNVNHKPSNTKVDKKVEPKSCDKTHT (SEQ ID NO: 186) |
| | Light Chain (with kappa light chain constant region) |
| | DIQMTQTTSSLSASLGDRVTISCRASQDISNFLNWYQQRPDGTVKLLIYYTSRLHSGVPSRFSGSGSGTDFSLTVSNLEQEDIATYFCQQGHTLPYTFGGGTKLEIKRTVAAPSVFIFPPSDEQLKSGTASVVCLLNNFYPREAKVQWKVDNALQSGNSQESVTEQDSKDSTYSLSSTLTLSKADYEKHKVYACEVTHQGLSSPVTKSFNRGEC (SEQ ID NO: 181) |
| 5-H12 | Heavy Chain (with partial human IgG1 constant region) |
| | QIOLQQSGPELVRPGASVKISCKASGYSFTDYCINWVNQRPGQGLEWIGWIYPGSGNTRYSERFKGKATLTVDTSSNTAYMQLSSLTSEDSAVYFCAREDYYPYHGMDYWGQGTSVTVSSASTKGPSVFPLAPSSKSTSGGTAALGCLVKDYFPEPVTVSWNSGALTSGVHTFPAVLQSSGLYSLSSVVTVPSSSLGTQTYICNVNHKPSNTKVDKKVEPKSCDKTHT (SEQ ID NO: 187) |
| | Light Chain (with kappa light chain constant region) |
| | DIVLTQSPTSLAVSLGQRATISCRASESVDGYDNSFMHWYQQKPGQPPKLLIFRASNLESGIPARFSGSGSRTDFTLTINPVEAADVATYYCQQSSEDPWTFGGGTKLEIKRTVAAPSVFIFPPSDEQLKSGTASVVCLLNNFYPREAKVQWKVDNALQSGNSQESVTEQDSKDSTYSLSSTLTLSKADYEKHKVYACEVTHQGLSSPVTKSFNRGEC (SEQ ID NO: 183) |
| 5-H12 Variant 1 | Heavy Chain (with partial human IgG1 constant region) |
| | QIOLQQSGPELVRPGASVKISCKASGYSFTDYYINWVNQRPGQGLEWIGWIYPGSGNTRYSERFKGKATLTVDTSSNTAYMQLSSLTSEDSAVYFCAREDYYPYHGMDYWGQGTSVTVSSASTKGPSVFPLAPSSKSTSGGTAALGCLVKDYFPEPVTVSWNSGALTSGVHTFPAVLQSSGLYSLSSVVTVPSSSLGTQTYICNVNHKPSNTKVDKKVEPKSCDKTHT (SEQ ID NO: 306) |
| | Light Chain (with kappa light chain constant region) |
| | DIVLTQSPTSLAVSLGQRATISCRASESVDGYDNSFMHWYQQKPGQPPKLLIFRASNLESGIPARFSGSGSRTDFTLTINPVEAADVATYYCQQSSEDPWTFGGGTKLEIKRTVAAPSVFIFPPSDEQLKSGTASVVCLLNNFYPREAKVQWKVDNALQSGNSQESVTEQDSKDSTYSLSSTLTLSKADYEKHKVYACEVTHQGLSSPVTKSFNRGEC (SEQ ID NO: 183) |
| 5-H12 Variant 2 | Heavy Chain (with partial human IgG1 constant region) |
| | QIOLQQSGPELVRPGASVKISCKASGYSFTDYDINWVNQRPGQGLEWIGWIYPGSGNTRYSERFKGKATLTVDTSSNTAYMQLSSLTSEDSAVYFCAREDYYPYHGMDYWGQGTSVTVSSASTKGPSVFPLAPSSKSTSGGTAALGCLVKDYFPEPVTVSWNSGALTSGVHTFPAVLQSSGLYSLSSVVTVPSSSLGTQTYICNVNHKPSNTKVDKKVEPKSCDKTHT (SEQ ID NO: 307) |
| | Light Chain (with kappa light chain constant region) |
| | DIVLTQSPTSLAVSLGQRATISCRASESVDGYDNSFMHWYQQKPGQPPKLLIFRASNLESGIPARFSGSGSRTDFTLTINPVEAADVATYYCQQSSEDPWTFGGGTKLEIKRTVAAPSVFIFPPSDEQLKSGTASVVCLLNNFYPREAKVQWKVDNALQSGNSQESVTEQDSKDSTYSLSSTLTLSKADYEKHKVYACEVTHQGLSSPVTKSFNRGEC (SEQ ID NO: 183) |

* VH/VL sequences underlined

[0379] In some embodiments, the anti-TfR antibody of the present disclosure comprises a heavy chain containing no more than 25 amino acid variations (e.g., no more than 25, 24, 23, 22, 21, 20, 19, 18, 17, 16, 15, 14, 13, 12, 11, 10, 9, 8, 7, 6, 5, 4, 3, 2, or 1 amino acid variation) as compared with the heavy chain as set forth in SEQ ID NO: 185, SEQ ID NO: 186, SEQ ID NO: 187, SEQ ID NO: 304, SEQ ID NO: 305. SEQ ID NO: 306, or SEQ ID NO: 307. Alternatively or in addition (e.g., in addition), the anti-TfR antibody of the present disclosure comprises a light chain containing no more than 25 amino acid variations (e.g., no more than 25, 24, 23, 22, 21, 20, 19, 18, 17, 16, 15, 14, 13, 12, 11, 10, 9, 8, 7, 6, 5, 4, 3, 2, or 1 amino acid variation) as compared with the light chain as set forth in SEQ ID NO: 179, SEQ ID NO: 181, or SEQ ID NO: 183. In some embodiments, the anti-TfR antibody described herein comprises a heavy chain comprising an amino acid sequence that is at least 75% (e.g., 75%, 80%, 85%, 90%, 95%, 98%, or 99%) identical to SEQ ID NO: 185, SEQ ID NO: 186, SEQ ID NO: 187, SEQ ID NO: 304, SEQ ID NO: 305. SEQ ID NO: 306, or SEQ ID NO: 307. Alternatively or in addition (e.g., in addition), the anti-TfR antibody described herein comprises a light chain comprising an amino acid sequence that is at least 75% (e.g., 75%, 80%, 85%, 90%, 95%, 98%, or 99%) identical to SEQ ID NO: 179, SEQ ID NO: 181, or SEQ ID NO: 183. In some embodiments, the anti-TfR antibody described herein comprises a heavy chain comprising the amino acid sequence of SEQ ID NO: 185, SEQ ID NO: 186, SEQ ID NO: 187, SEQ ID NO: 304, SEQ ID NO: 305. SEQ ID NO: 306, or SEQ ID NO: 307. Alternatively or in addition (e.g., in addition), the anti-TfR antibody described herein comprises a light chain comprising the amino acid sequence of SEQ ID NO: 179, SEQ ID NO: 181, or SEQ ID NO: 183.

[0380] In some embodiments, the anti-TfR antibody of the present disclosure comprises a heavy chain containing no more than 25 amino acid variations (e.g., no more than 25, 24, 23, 22, 21, 20, 19, 18, 17, 16, 15, 14, 13, 12, 11, 10, 9, 8, 7, 6, 5, 4, 3, 2, or 1 amino acid variation) as compared with the heavy chain as set forth in SEQ ID NO: 185, SEQ ID NO: 304, or SEQ ID NO: 305. Alternatively or in addition (e.g., in addition), the anti-TfR antibody of the present disclosure comprises a light chain containing no more than 25 amino acid variations (e.g., no more than 25, 24, 23, 22, 21, 20, 19, 18, 17, 16, 15, 14, 13, 12, 11, 10, 9, 8, 7, 6, 5, 4, 3, 2, or 1 amino acid variation) as compared with the light chain as set forth in SEQ ID NO: 179. In some embodiments, the anti-TfR antibody described herein comprises a heavy chain comprising an amino acid sequence that is at least 75% (e.g., 75%, 80%, 85%, 90%, 95%, 98%, or 99%) identical to SEQ ID NO: 185, SEQ ID NO: 304, or SEQ ID NO: 305. Alternatively or in addition (e.g., in addition), the anti-TfR antibody described herein comprises a light chain comprising an amino acid sequence that is at least 75% (e.g., 75%, 80%, 85%, 90%, 95%, 98%, or 99%) identical to SEQ ID NO: 179. In some embodiments, the anti-TfR antibody described herein comprises a heavy chain comprising the amino acid sequence of SEQ ID NO: 185, SEQ ID NO: 304, or SEQ ID NO: 305. Alternatively or in addition (e.g., in addition), the anti-TfR antibody described herein comprises a light chain comprising the amino acid sequence of SEQ ID NO: 179.

[0381] In some embodiments, the anti-TfR antibody of the present disclosure comprises a heavy chain containing no more than 25 amino acid variations (e.g., no more than 25, 24, 23, 22, 21, 20, 19, 18, 17, 16, 15, 14, 13, 12, 11, 10, 9, 8, 7, 6, 5, 4, 3, 2, or 1 amino acid variation) as compared with the heavy chain as set forth in SEQ ID NO: 186. Alternatively or in addition (e.g., in addition), the anti-TfR antibody of the present disclosure comprises a light chain containing no more than 25 amino acid variations (e.g., no more than 25, 24, 23, 22, 21, 20, 19, 18, 17, 16, 15, 14, 13, 12, 10, 11, 9, 8, 7, 6, 5, 4, 3, 2, or 1 amino acid variation) as compared with the light chain as set forth in SEQ ID NO: 181. In some embodiments, the anti-TfR antibody described herein comprises a heavy chain comprising an amino acid sequence that is at least 75% (e.g., 75%, 80%, 85%, 90%, 95%, 98%, or 99%) identical to SEQ ID NO: 186. Alternatively or in addition (e.g., in addition), the anti-TfR antibody described herein comprises a light chain comprising an amino acid sequence that is at least 75% (e.g., 75%, 80%, 85%, 90%, 95%, 98%, or 99%) identical to SEQ ID NO: 181. In some embodiments, the anti-TfR antibody described herein comprises a heavy chain comprising the amino acid sequence of SEQ ID NO: 186. Alternatively or in addition (e.g., in addition), the anti-TfR antibody described herein comprises a light chain comprising the amino acid sequence of SEQ ID NO: 181.

[0382] In some embodiments, the anti-TfR antibody of the present disclosure comprises a heavy chain containing no more than 25 amino acid variations (e.g., no more than 25, 24, 23, 22, 21, 20, 19, 18, 17, 16, 15, 14, 13, 12, 11, 10, 9, 8, 7, 6, 5, 4, 3, 2, or 1 amino acid variation) as compared with the heavy chain as set forth in SEQ ID NO: 187, SEQ ID NO: 306, or SEQ ID NO: 307. Alternatively or in addition (e.g., in addition), the anti-TfR antibody of the present disclosure comprises a light chain containing no more than 25 amino acid variations (e.g., no more than 25, 24, 23, 22, 21, 20, 19, 18, 17, 16, 15, 14, 13, 12, 11, 10, 9, 8, 7, 6, 5, 4, 3, 2, or 1 amino acid variation) as compared with the light chain as set forth in SEQ ID NO: 183. In some embodiments, the anti-TfR antibody described herein comprises a heavy chain comprising an amino acid sequence that is at least 75% (e.g., 75%, 80%, 85%, 90%, 95%, 98%, or 99%) identical to SEQ ID NO: 187, SEQ ID NO: 306, or SEQ ID NO: 307. Alternatively or in addition (e.g., in addition), the anti-TfR antibody described herein comprises a light chain comprising an amino acid sequence that is at least 75% (e.g., 75%, 80%, 85%, 90%, 95%, 98%, or 99%) identical to SEQ ID NO: 183. In some embodiments, the anti-TfR antibody described herein comprises a heavy chain comprising the amino acid sequence of SEQ ID NO: 187, SEQ ID NO: 306, or SEQ ID NO: 307. Alternatively or in addition (e.g., in addition), the anti-TfR antibody described herein comprises a light chain comprising the amino acid sequence of SEQ ID NO: 183.

[0383] The anti-TfR receptor antibodies described herein can be in any antibody form, including, but not limited to, intact (i.e., full-length) antibodies, antigen-binding fragments thereof (such as Fab, F(ab′), F(ab′)2, Fv), single chain antibodies, bi-specific antibodies, or nanobodies. In some embodiments, the anti-TfR antibody described herein is a scFv. In some embodiments, the anti-TfR antibody described herein is a scFv-Fab (e.g., scFv fused to a portion of a constant region). In some embodiments, the anti-TfR receptor antibody described herein is a scFv fused to a constant region (e.g., human IgG1 constant region as set forth in SEQ ID NO: 175 or SEQ ID NO: 176, or a portion thereof such as the Fc portion) at either the N-terminus of C-terminus.

[0384] In some embodiments, any one of the anti-TfRl antibodies described herein may comprise a signal peptide in the heavy and/or (e.g., and) light chain sequence (e.g., a N-terminal signal peptide). In some embodiments, the anti-TfRl antibody described herein comprises any one of the VH and VL sequences, any one of the IgG heavy chain and light chain sequences, or any one of the F(ab′) heavy chain and light chain sequences described herein, and further comprises a signal peptide (e.g., a N-terminal signal peptide). In some embodiments, the signal peptide comprises the amino acid sequence of MGWSCIILFLVATATGVHS (SEQ ID NO: 214).

[0385] The present disclosure, in some aspects, provide another new anti-TfR antibody that can be used as a muscle-targeting agent (e.g., in a muscle-targeting complex). The CDR sequences and variable domain sequences of the antibody are provided in Table 7.

TABLE 7

CDR sequences of anti-TfR antibodies according to different definition systems and variable domain sequences

| | | | |
|---|---|---|---|
| No. system | IMGT | Kabat | Chothia |
| CDR-H1 | GYSFTSYW (SEQ ID NO: 188) | SYWIG (SEQ ID NO: 194) | GYSFTSY (SEQ ID NO: 199) |
| CDR-H2 | IYPGDSDT (SEQ ID NO: 189) | IIYPGDSDTRYSPSFQGQ (SEQ ID NO: 195) | GDS (SEQ ID NO: 200) |
| CDR-H3 | ARFPYDSSGYYSFDY (SEQ ID NO: 190) | FPYDSSGYYSFDY (SEQ ID NO: 196) | PYDSSGYYSFD (SEQ ID NO: 201) |
| CDR-L1 | QSISSY (SEQ ID NO: 191) | RASQSISSYLN (SEQ ID NO: 197) | SQSISSY (SEQ ID NO: 202) |
| CDR-L2 | AAS (SEQ ID NO: 192) | AASSLQS (SEQ ID NO: 198) | AAS (SEQ ID NO: 192) |
| CDR-L3 | QQSYSTPLT (SEQ ID NO: 193) | QQSYSTPLT (SEQ ID NO: 193) | SYSTPL (SEQ ID NO: 203) |
| VH | QVQLVQSGAEVKKPGESLKISCKGSGYSFTSYWIGWVRQMPGKGLEWMGIIYPGDSDTRYSPSFQGQVTISADKSISTAYLQWSSLKASDTAMYYCARFPYDSSGYYSFDYWGQGTLVTVSS (SEQ ID NO: 204) | | |
| VL | [sequence omitted] (SEQ ID NO: 205) | | |

[0386] In some embodiments, the anti-TfR antibodies of the present disclosure comprises one or more of the CDR-H (e.g., CDR-H1, CDR-H2, and CDR-H3) amino acid sequences from any one of the anti-TfR antibodies selected from Table 7. In some embodiments, the anti-TfR antibodies of the present disclosure comprise the CDR-H1, CDR-H2, and CDR-H3 as provided for each numbering system provided in Table 7. In some embodiments, the anti-TfR antibodies of the present disclosure comprises one or more of the CDR-L (e.g., CDR-L1, CDR-L2, and CDR-L3) amino acid sequences from any one of the anti-TfR antibodies selected from Table 7. In some embodiments, the anti-TfR antibodies of the present disclosure comprise the CDR-L1, CDR-L2, and CDR-L3 as provided for each numbering system provided in Table 7.

[0387] In some embodiments, the anti-TfR antibodies of the present disclosure comprises the CDR-H1, CDR-H2, CDR-H3, CDR-L1, CDR-L2, and CDR-L3 as provided for each numbering system provided in Table 7. In some embodiments, antibody heavy and light chain CDR3 domains may play a particularly important role in the binding specificity/affinity of an antibody for an antigen. Accordingly, the anti-TfR antibodies of the disclosure may include at least the heavy and/or (e.g., and) light chain CDR3s of any one of the anti-TfR antibody provided in Table 7.

[0388] In some examples, any of the anti-TfR antibodies of the disclosure have one or more CDR (e.g., CDR-H or CDR-L) sequences substantially similar to any of the CDR-H1, CDR-H2, CDR-H3, CDR-L1, CDR-L2, and/or (e.g., and) CDR-L3 sequences provided in Table 7. In some embodiments, the position of one or more CDRs along the VH (e.g., CDR-H1, CDR-H2, or CDR-H3) and/or (e.g., and) VL (e.g., CDR-L1, CDR-L2, or CDR-L3) region of an antibody described herein can vary by one, two, three, four, five, or six amino acid positions so long as immunospecific binding to transferrin receptor (e.g., human transferrin receptor) is maintained (e.g., substantially maintained, for example, at least 50%, at least 60%, at least 70%, at least 80%, at least 90%, at least 95% of the binding of the original antibody from which it is derived). For example, in some embodiments, the position defining a CDR of any antibody described herein can vary by shifting the N-terminal and/or (e.g., and) C-terminal boundary of the CDR by one, two, three, four, five, or six amino acids, relative to the CDR position of any one of the antibodies described herein, so long as immunospecific binding to transferrin receptor (e.g., human transferrin receptor) is maintained (e.g., substantially maintained, for example, at least 50%, at least 60%, at least 70%, at least 80%, at least 90%, at least 95% of the binding of the original antibody from which it is derived). In another embodiment, the length of one or more CDRs along the VH (e.g., CDR-H1, CDR-H2, or CDR-H3) and/or (e.g., and) VL (e.g., CDR-L1, CDR-L2, or CDR-L3) region of an antibody described herein can vary (e.g., be shorter or longer) by one, two, three, four, five, or more amino acids, so long as immunospecific binding to transferrin receptor (e.g., human transferrin receptor) is maintained (e.g., substantially maintained, for example, at least 50%, at least 60%, at least 70%, at least 80%, at least 90%, at least 95% of the binding of the original antibody from which it is derived).

[0389] Accordingly, in some embodiments, a CDR-L1, CDR-L2, CDR-L3, CDR-H1, CDR-H2, and/or (e.g., and) CDR-H3 described herein may be one, two, three, four, five or more amino acids shorter than one or more of the CDRs described herein (e.g., provided in Table 7) so long as immunospecific binding to transferrin receptor (e.g., human transferrin receptor) is maintained (e.g., substantially maintained, for example, at least 50%, at least 60%, at least 70%, at least 80%, at least 90%, at least 95% relative to the binding of the original antibody from which it is derived). In some embodiments, a CDR-L1, CDR-L2, CDR-L3, CDR-H1, CDR-H2, and/or (e.g., and) CDR-H3 described herein may be one, two, three, four, five or more amino acids longer than one or more of the CDRs described herein (e.g., CDRS from the anti-TfR antibody provided in Table 7) so long as immunospecific binding to transferrin receptor (e.g., human transferrin receptor) is maintained (e.g., substantially maintained, for example, at least 50%, at least 60%, at least 70%, at least 80%, at least 90%, at least 95% relative to the binding of the original antibody from which it is derived). In some embodiments, the amino portion of a CDR-L1, CDR-L2, CDR-L3, CDR-H1, CDR-H2, and/or (e.g., and) CDR-H3 described herein can be extended by one, two, three, four, five or more amino acids compared to one or more of the CDRs described herein (e.g., CDRs from the anti-TfR antibody provided in Table 7) so long as immunospecific binding to transferrin receptor (e.g., human transferrin receptor is maintained (e.g., substantially maintained, for example, at least 50%, at least 60%, at least 70%, at least 80%, at least 90%, at least 95% relative to the binding of the original antibody from which it is derived). In some embodiments, the carboxy portion of a CDR-L1, CDR-L2, CDR-L3, CDR-H1, CDR-H2, and/or (e.g., and) CDR-H3 described herein can be extended by one, two, three, four, five or more amino acids compared to one or more of the CDRs described herein (e.g., CDRS from the anti-TfR antibody provided in Table 7) so long as immunospecific binding to transferrin receptor (e.g., human transferrin receptor) is maintained (e.g., substantially maintained, for example, at least 50%, at least 60%, at least 70%, at least 80%, at least 90%, at least 95% relative to the binding of the original antibody from which it is derived). In some embodiments, the amino portion of a CDR-L1, CDR-L2, CDR-L3, CDR-H1, CDR-H2, and/or (e.g., and) CDR-H3 described herein can be shortened by one, two, three, four, five or more amino acids compared to one or more of the CDRs described herein (e.g., CDRS from the anti-TfR antibody provided in Table 7) so long as immunospecific binding to transferrin receptor (e.g., human transferrin receptor) is maintained (e.g., substantially maintained, for example, at least 50%, at least 60%, at least 70%, at least 80%, at least 90%, at least 95% relative to the binding of the original antibody from which it is derived). In some embodiments, the carboxy portion of a CDR-L1, CDR-L2, CDR-L3, CDR-H1, CDR-H2, and/or (e.g., and) CDR-H3 described herein can be shortened by one, two, three, four, five or more amino acids compared to one or more of the CDRs described herein (e.g., CDRS from the anti-TfR antibody provided in Table 7) so long as immunospecific binding to transferrin receptor (e.g., human transferrin receptor) is maintained (e.g., substantially maintained, for example, at least 50%, at least 60%, at least 70%, at least 80%, at least 90%, at least 95% relative to the binding of the original antibody from which it is derived). Any method can be used to ascertain whether immunospecific binding to transferrin receptor (e.g., human transferrin receptor) is maintained, for example, using binding assays and conditions described in the art.

[0390] In some examples, any of the anti-TfR antibodies of the disclosure have one or more CDR (e.g., CDR-H or CDR-L) sequences substantially similar to any one of the anti-TfR antibody provided in Table 7. For example, the antibodies may include one or more CDR sequence(s) from the anti-TfR antibody provided in Table 7 and containing up to 5, 4, 3, 2, or 1 amino acid residue variations as compared to the corresponding CDR region in any one of the CDRs provided herein (e.g., CDRs from the anti-TfR antibody provided in Table 7) so long as immunospecific binding to transferrin receptor (e.g., human transferrin receptor) is maintained (e.g., substantially maintained, for example, at least 50%, at least 60%, at least 70%, at least 80%, at least 90%, at least 95% relative to the binding of the original antibody from which it is derived). In some embodiments, any of the amino acid variations in any of the CDRs provided herein may be conservative variations. Conservative variations can be introduced into the CDRs at positions where the residues are not likely to be involved in interacting with a transferrin receptor protein (e.g., a human transferrin receptor protein), for example, as determined based on a crystal structure.

[0391] Some aspects of the disclosure provide anti-TfR antibodies that comprise one or more of the heavy chain variable (VH) and/or (e.g., and) light chain variable (VL) domains provided herein. In some embodiments, the anti-TfR antibodies of the disclosure include any antibody that includes a heavy chain variable domain and/or (e.g., and) a light chain variable domain of the anti-TfR1 antibody provided in Table 7.

[0392] Aspects of the disclosure provide anti-TfR antibodies having a heavy chain variable (VH) and/or (e.g., and) a light chain variable (VL) domain amino acid sequence homologous to any of those described herein. In some embodiments, the anti-TfR antibody comprises a heavy chain variable sequence or a light chain variable sequence that is at least 75% (e.g., 80%, 85%, 90%, 95%, 98%, or 99%) identical to the heavy chain variable sequence and/ or any light chain variable sequence provided in Table 7. In some embodiments, the homologous heavy chain variable and/or (e.g., and) a light chain variable amino acid sequences do not vary within any of the CDR sequences provided herein. For example, in some embodiments, the degree of sequence variation (e.g., 75%, 80%, 85%, 90%, 95%, 98%, or 99%) may occur within a heavy chain variable and/or (e.g., and) a light chain variable sequence excluding any of the CDR sequences provided herein. In some embodiments, any of the anti-TfR antibodies provided herein comprise a heavy chain variable sequence and a light chain variable sequence that comprises a framework sequence that is at least 75%, 80%, 85%, 90%, 95%, 98%, or 99% identical to the framework sequence of any anti-TfR antibody provided in Table 7.

[0393] In some embodiments, the anti-TfR antibody of the present disclosure comprises a CDR-H1, a CDR-H2, and a CDR-H3 of a heavy chain variable domain having the amino acid sequence of SEQ ID NO: 204. Alternatively or in addition (e.g., in addition), the anti-TfR antibody of the present disclosure comprises a CDR-L1, a CDR-L2, and a CDR-L3 of a light chain variable domain having the amino acid sequence of SEQ ID NO: 205.

[0394] In some embodiments, the anti-TfR antibody of the present disclosure comprises a CDR-H1 having the amino acid sequence of SEQ ID NO: 188 (according to the IMGT definition system), a CDR-H2 having the amino acid sequence of SEQ ID NO: 189 (according to the IMGT definition system), a CDR-H3 having the amino acid sequence of SEQ ID NO: 190 (according to the IMGT definition system), a CDR-L1 having the amino acid sequence of SEQ ID NO: 191 (according to the IMGT definition system), a CDR-L2 having the amino acid sequence of SEQ ID NO: 192 (according to the IMGT definition system), and a CDR-L3 having the amino acid sequence of SEQ ID NO: 193 (according to the IMGT definition system).

[0395] In some embodiments, anti-TfR antibody of the present disclosure comprises a CDR-H1, a CDR-H2, and a CDR-H3, which collectively contains no more than 5 amino acid variations (e.g., no more than 5, 4, 3, 2, or 1 amino acid variation) as compared with the CDR-H1 having the amino acid sequence of SEQ ID NO: 188, CDR-H2 having the amino acid sequence of SEQ ID NO: 189, and CDR-H3 having the amino acid sequence of SEQ ID NO: 190. Alternatively or in addition (e.g., in addition), the anti-TfR antibody of the present disclosure comprises a CDR-L1, a CDR-L2, and a CDR-L3, which collectively contains no more than 5 amino acid variations (e.g., no more than 5, 4, 3, 2 or 1 amino acid variation) as compared with the CDR-L1 having the amino acid sequence of SEQ ID NO: 191, CDR-L2 having the amino acid sequence of SEQ ID NO: 192, and CDR-L3 having the amino acid sequence of SEQ ID NO: 193.

[0396] In some embodiments, the anti-TfR antibody of the present disclosure comprises a CDR-H1, a CDR-H2, and a CDR-H3 that collectively are at least 75% (e.g., 75%, 80%, 85%, 90%, 95%, 98%, or 99%) identical to the CDR-H1 having the amino acid sequence of SEQ ID NO: 188, CDR-H2 having the amino acid sequence of SEQ ID NO: 189, and CDR-H3 having the amino acid sequence of SEQ ID NO: 190. Alternatively or in addition (e.g., in addition), the anti-TfR antibody of the present disclosure comprises a CDR-L1, a CDR-L2, and a CDR-L3 that collectively are at least 75% (e.g., 75%, 80%, 85%, 90%, 95%, 98%, or 99%) identical to the to the CDR-L1 having the amino acid sequence of SEQ ID NO: 191, CDR-L2 having the amino acid sequence of SEQ ID NO: 192, and CDR-L3 having the amino acid sequence of SEQ ID NO: 193.

[0397] In some embodiments, the anti-TfR antibody of the present disclosure comprises: a CDR-H1 having no more than 3 amino acid variations (e.g., no more than 3, 2, or 1 amino acid variation) as compared with the CDR-H1 having the amino acid sequence of SEQ ID NO: 188; a CDR-H2 having no more than 3 amino acid variations (e.g., no more than 3, 2, or 1 amino acid variation) as compared with the CDR-H2 having the amino acid sequence of SEQ ID NO: 189; and/or (e.g., and) a CDR-H3 having no more than 3 amino acid variations (e.g., no more than 3, 2, or 1 amino acid variation) as compared with the CDR-H3 having the amino acid sequence of SEQ ID NO: 190. Alternatively or in addition (e.g., in addition), the anti-TfR antibody of the present disclosure comprises: a CDR-L1 having no more than 3 amino acid variations (e.g., no more than 3, 2, or 1 amino acid variation) as compared with the CDR-L1 having the amino acid sequence of SEQ ID NO: 191; a CDR-L2 having no more than 3 amino acid variations (e.g., no more than 3, 2, or 1 amino acid variation) as compared with the CDR-L2 having the amino acid sequence of SEQ ID NO: 192; and/or (e.g., and) a CDR-L3 having no more than 3 amino acid variations (e.g., no more than 3, 2, or 1 amino acid variation) as compared with the CDR-L3 having the amino acid sequence of SEQ ID NO: 193.

[0398] In some embodiments, the anti-TfR antibody of the present disclosure comprises a CDR-H1 having the amino acid sequence of SEQ ID NO: 194 (according to the Kabat definition system), a CDR-H2 having the amino acid sequence of SEQ ID NO: 195 (according to the Kabat definition system), a CDR-H3 having the amino acid sequence of SEQ ID NO: 196 (according to the Kabat definition system), a CDR-L1 having the amino acid sequence of SEQ ID NO: 197 (according to the Kabat definition system), a CDR-L2 having the amino acid sequence of SEQ ID NO: 198 (according to the Kabat definition system), and a CDR-L3 having the amino acid sequence of SEQ ID NO: 193 (according to the Kabat definition system).

[0399] In some embodiments, anti-TfR antibody of the present disclosure comprises a CDR-H1, a CDR-H2, and a CDR-H3, which collectively contains no more than 5 amino acid variations (e.g., no more than 5, 4, 3, 2, or 1 amino acid variation) as compared with the CDR-H1 having the amino acid sequence of SEQ ID NO: 194, CDR-H2 having the amino acid sequence of SEQ ID NO: 195, and CDR-H3 having the amino acid sequence of SEQ ID NO: 196. “Collectively” means that the total number of amino acid variations in all of the three heavy chain CDRs is within the defined range. Alternatively or in addition (e.g., in addition), the anti-TfR antibody of the present disclosure comprises a CDR-L1, a CDR-L2, and a CDR-L3, which collectively contains no more than 5 amino acid variations (e.g., no more than 5, 4, 3, 2 or 1 amino acid variation) as compared with the CDR-L1 having the amino acid sequence of SEQ ID NO: 197, CDR-L2 having the amino acid sequence of SEQ ID NO: 198, and CDR-L3 having the amino acid sequence of SEQ ID NO: 193.

[0400] In some embodiments, the anti-TfR antibody of the present disclosure comprises a CDR-H1, a CDR-H2, and a CDR-H3 that collectively are at least 75% (e.g., 75%, 80%, 85%, 90%, 95%, 98%, or 99%) identical to the CDR-H1 having the amino acid sequence of SEQ ID NO: 194, CDR-H2 having the amino acid sequence of SEQ ID NO: 195, and CDR-H3 having the amino acid sequence of SEQ ID NO: 196. Alternatively or in addition (e.g., in addition), the anti-TfR antibody of the present disclosure comprises a CDR-L1, a CDR-L2, and a CDR-L3 that collectively are at least 75% (e.g., 75%, 80%, 85%, 90%, 95%, 98%, or 99%) identical to the to the CDR-L1 having the amino acid sequence of SEQ ID NO: 197, CDR-L2 having the amino acid sequence of SEQ ID NO: 198, and CDR-L3 having the amino acid sequence of SEQ ID NO: 193.

[0401] In some embodiments, the anti-TfR antibody of the present disclosure comprises: a CDR-H1 having no more than 3 amino acid variations (e.g., no more than 3, 2, or 1 amino acid variation) as compared with the CDR-H1 having the amino acid sequence of SEQ ID NO: 194 ; a CDR-H2 having no more than 3 amino acid variations (e.g., no more than 3, 2, or 1 amino acid variation) as compared with the CDR-H2 having the amino acid sequence of SEQ ID NO: 195; and/or (e.g., and) a CDR-H3 having no more than 3 amino acid variations (e.g., no more than 3, 2, or 1 amino acid variation) as compared with the CDR-H3 having the amino acid sequence of SEQ ID NO: 196. Alternatively or in addition (e.g., in addition), the anti-TfR antibody of the present disclosure comprises: a CDR-L1 having no more than 3 amino acid variations (e.g., no more than 3, 2, or 1 amino acid variation) as compared with the CDR-L1 having the amino acid sequence of SEQ ID NO: 197; a CDR-L2 having no more than 3 amino acid variations (e.g., no more than 3, 2, or 1 amino acid variation) as compared with the CDR-L2 having the amino acid sequence of SEQ ID NO: 198; and/or (e.g., and) a CDR-L3 having no more than 3 amino acid variations (e.g., no more than 3, 2, or 1 amino acid variation) as compared with the CDR-L3 having the amino acid sequence of SEQ ID NO: 193.

[0402] In some embodiments, the anti-TfR antibody of the present disclosure comprises a CDR-H1 having the amino acid sequence of SEQ ID NO: 199 (according to the Chothia definition system), a CDR-H2 having the amino acid sequence of SEQ ID NO: 200 (according to the Chothia definition system), a CDR-H3 having the amino acid sequence of SEQ ID NO: 201 (according to the Chothia definition system), a CDR-L1 having the amino acid sequence of SEQ ID NO: 202 (according to the Chothia definition system), a CDR-L2 having the amino acid sequence of SEQ ID NO: 192 (according to the Chothia definition system), and a CDR-L3 having the amino acid sequence of SEQ ID NO: 203 (according to the Chothia definition system).

[0403] In some embodiments, anti-TfR antibody of the present disclosure comprises a CDR-H1, a CDR-H2, and a CDR-H3, which collectively contains no more than 5 amino acid variations (e.g., no more than 5, 4, 3, 2, or 1 amino acid variation) as compared with the CDR-H1 having the amino acid sequence of SEQ ID NO: 199, CDR-H2 having the amino acid sequence of SEQ ID NO: 200, and CDR-H3 having the amino acid sequence of SEQ ID NO: 201. “Collectively” means that the total number of amino acid variations in all of the three heavy chain CDRs is within the defined range. Alternatively or in addition (e.g., in addition), the anti-TfR antibody of the present disclosure comprises a CDR-L1, a CDR-L2, and a CDR-L3, which collectively contains no more than 5 amino acid variations (e.g., no more than 5, 4, 3, 2 or 1 amino acid variation) as compared with the CDR-L1 having the amino acid sequence of SEQ ID NO: 202, CDR-L2 having the amino acid sequence of SEQ ID NO: 192, and CDR-L3 having the amino acid sequence of SEQ ID NO: 203.

[0404] In some embodiments, the anti-TfR antibody of the present disclosure comprises a CDR-H1, a CDR-H2, and a CDR-H3 that collectively are at least 75% (e.g., 75%, 80%, 85%, 90%, 95%, 98%, or 99%) identical to the CDR-H1 having the amino acid sequence of SEQ ID NO: 199, CDR-H2 having the amino acid sequence of SEQ ID NO: 200, and CDR-H3 having the amino acid sequence of SEQ ID NO: 201. Alternatively or in addition (e.g., in addition), the anti-TfR antibody of the present disclosure comprises a CDR-L1, a CDR-L2, and a CDR-L3 that collectively are at least 75% (e.g., 75%, 80%, 85%, 90%, 95%, 98%, or 99%) identical to the to the CDR-L1 having the amino acid sequence of SEQ ID NO: 202, CDR-L2 having the amino acid sequence of SEQ ID NO: 192, and CDR-L3 having the amino acid sequence of SEQ ID NO: 203.

[0405] In some embodiments, the anti-TfR antibody of the present disclosure comprises: a CDR-H1 having no more than 3 amino acid variations (e.g., no more than 3, 2, or 1 amino acid variation) as compared with the CDR-H1 having the amino acid sequence of SEQ ID NO: 199; a CDR-H2 having no more than 3 amino acid variations (e.g., no more than 3, 2, or 1 amino acid variation) as compared with the CDR-H2 having the amino acid sequence of SEQ ID NO: 200; and/or (e.g., and) a CDR-H3 having no more than 3 amino acid variations (e.g., no more than 3, 2, or 1 amino acid variation) as compared with the CDR-H3 having the amino acid sequence of SEQ ID NO: 201. Alternatively or in addition (e.g., in addition), the anti-TfR antibody of the present disclosure comprises: a CDR-L1 having no more than 3 amino acid variations (e.g., no more than 3, 2, or 1 amino acid variation) as compared with the CDR-L1 having the amino acid sequence of SEQ ID NO: 202; a CDR-L2 having no more than 3 amino acid variations (e.g., no more than 3, 2, or 1 amino acid variation) as compared with the CDR-L2 having the amino acid sequence of SEQ ID NO: 192; and/or (e.g., and) a CDR-L3 having no more than 3 amino acid variations (e.g., no more than 3, 2, or 1 amino acid variation) as compared with the CDR-L3 having the amino acid sequence of SEQ ID NO: 203.

[0406] In some embodiments, the In some embodiments, the anti-TfR antibody of the present disclosure comprises a CDR-H1 comprising the amino acid sequence of SEQ ID NO: 194, a CDR-H2 comprising the amino acid sequence of SEQ ID NO: 189, a CDR-H3 comprising the amino acid sequence of SEQ ID NO: 196, a CDR-L1 comprising the amino acid sequence of SEQ ID NO: 197, a CDR-L2 comprising the amino acid sequence of SEQ ID NO: 198, and a CDR-L3 comprising the amino acid sequence of SEQ ID NO: 193.

[0407] In some embodiments, the anti-TfR antibody of the present disclosure is a human antibody comprising a VH comprising the amino acid sequence of SEQ ID NO: 204. Alternatively or in addition (e.g., in addition), the anti-TfR antibody of the present disclosure is a human antibody comprising a VL comprising the amino acid sequence of SEQ ID NO: 205. In some embodiments, the present disclosure contemplate other humanized/human antibodies comprising the CDR-H1, CDR-H1, CDR-H3 of the VH comprising SEQ ID NO: 204 and the CDR-L1, CDR-L1, and CDR-L3 of the VL comprising SEQ ID NO: 205 with human framework regions.

[0408] In some embodiments, the anti-TfR antibody of the present disclosure comprises a VH containing no more than 25 amino acid variations (e.g., no more than 25, 24, 23, 22, 21, 20, 19, 18, 17, 16, 15, 14, 13, 12, 11, 10, 9, 8, 7, 6, 5, 4, 3, 2, or 1 amino acid variation) as compared with the VH as set forth in SEQ ID NO: 204. Alternatively or in addition (e.g., in addition), the anti-TfR antibody of the present disclosure comprises a VL containing no more than 25 amino acid variations (e.g., no more than 25, 24, 23, 22, 21, 20, 19, 18, 17, 16, 15, 14, 13, 12, 11, 10, 9, 8, 7, 6, 5, 4, 3, 2, or 1 amino acid variation) as compared with the VL as set forth in SEQ ID NO: 205.

[0409] In some embodiments, the anti-TfR antibody of the present disclosure comprises a VH comprising an amino acid sequence that is at least 75% (e.g., 75%, 80%, 85%, 90%, 95%, 98%, or 99%) identical to the VH as set forth in SEQ ID NO: 204. Alternatively or in addition (e.g., in addition), the anti-TfR antibody of the present disclosure comprises a VL comprising an amino acid sequence that is at least 75% (e.g., 75%, 80%, 85%, 90%, 95%, 98%, or 99%) identical to the VL as set forth in SEQ ID NO: 205.

[0410] In some embodiments, the anti-TfR antibody of the present disclosure is a humanized antibody. In some embodiments, the humanized anti-TfR antibody comprises a humanized VH comprising a CDR-H1 having the amino acid sequence of SEQ ID NO: 188 (according to the IMGT definition system), a CDR-H2 having the amino acid sequence of SEQ ID NO: 189 (according to the IMGT definition system), a CDR-H3 having the amino acid sequence of SEQ ID NO: 190 (according to the IMGT definition system); and a humanized VL comprising a CDR-L1 having the amino acid sequence of SEQ ID NO: 191 (according to the IMGT definition system), a CDR-L2 having the amino acid sequence of SEQ ID NO: 192 (according to the IMGT definition system), and a CDR-L3 having the amino acid sequence of SEQ ID NO: 193 (according to the IMGT definition system), wherein the humanized VH comprises an amino acid sequence that is at least 75% (e.g., 75%, 80%, 85%, 90%, 95%, 98%, or 99%) identical to the VH as set forth in SEQ ID NO: 204, and the humanized VL comprises an amino acid sequence that is at least 75% (e.g., 75%, 80%, 85%, 90%, 95%, 98%, or 99%) identical to the VL as set forth in SEQ ID NO: 205.

[0411] In some embodiments, the humanized anti-TfR antibody comprises a humanized VH comprising a CDR-H1 having the amino acid sequence of SEQ ID NO: 188 (according to the IMGT definition system), a CDR-H2 having the amino acid sequence of SEQ ID NO: 189 (according to the IMGT definition system), a CDR-H3 having the amino acid sequence of SEQ ID NO: 190 (according to the IMGT definition system); and a humanized VL comprising a CDR-L1 having the amino acid sequence of SEQ ID NO: 191 (according to the IMGT definition system), a CDR-L2 having the amino acid sequence of SEQ ID NO: 192 (according to the IMGT definition system), and a CDR-L3 having the amino acid sequence of SEQ ID NO: 193 (according to the IMGT definition system), wherein the humanized VH contains no more than 25 amino acid variations (e.g., no more than 25, 24, 23, 22, 21, 20, 19, 18, 17, 16, 15, 14, 13, 12, 11, 10, 9, 8, 7, 6, 5, 4, 3, 2, or 1 amino acid variation) as compared with the VH as set forth in SEQ ID NO: 204, and the humanized VL contains no more than 25 amino acid variations (e.g., no more than 25, 24, 23, 22, 21, 20, 19, 18, 17, 16, 15, 14, 13, 12, 11, 10, 9, 8, 7, 6, 5, 4, 3, 2, or 1 amino acid variation) as compared with the VL as set forth in SEQ ID NO: 205.

[0412] In some embodiments, the humanized anti-TfR antibody comprises a humanized VH comprising a CDR-H1 having the amino acid sequence of SEQ ID NO: 194 (according to the Kabat definition system), a CDR-H2 having the amino acid sequence of SEQ ID NO: 195 (according to the Kabat definition system), a CDR-H3 having the amino acid sequence of SEQ ID NO: 196 (according to the Kabat definition system), a CDR-L1 having the amino acid sequence of SEQ ID NO: 197 (according to the Kabat definition system), a CDR-L2 having the amino acid sequence of SEQ ID NO: 198 (according to the Kabat definition system), and a CDR-L3 having the amino acid sequence of SEQ ID NO: 193 (according to the Kabat definition system), wherein the humanized VH comprises an amino acid sequence that is at least 75% (e.g., 75%, 80%, 85%, 90%, 95%, 98%, or 99%) identical to the VH as set forth in SEQ ID NO: 204, and the humanized VL comprises an amino acid sequence that is at least 75% (e.g., 75%, 80%, 85%, 90%, 95%, 98%, or 99%) identical to the VL as set forth in SEQ ID NO: 205.

[0413] In some embodiments, the humanized anti-TfR antibody comprises a CDR-H1 having the amino acid sequence of SEQ ID NO: 194 (according to the Kabat definition system), a CDR-H2 having the amino acid sequence of SEQ ID NO: 195 (according to the Kabat definition system), a CDR-H3 having the amino acid sequence of SEQ ID NO: 196 (according to the Kabat definition system), a CDR-L1 having the amino acid sequence of SEQ ID NO: 197 (according to the Kabat definition system), a CDR-L2 having the amino acid sequence of SEQ ID NO: 198 (according to the Kabat definition system), and a CDR-L3 having the amino acid sequence of SEQ ID NO: 193 (according to the Kabat definition system), wherein the humanized VH contains no more than 25 amino acid variations (e.g., no more than 25, 24, 23, 22, 21, 20, 19, 18, 17, 16, 15, 14, 13, 12, 11, 10, 9, 8, 7, 6, 5, 4, 3, 2, or 1 amino acid variation) as compared with the VH as set forth in SEQ ID NO: 204, and the humanized VL contains no more than 25 amino acid variations (e.g., no more than 25, 24, 23, 22, 21, 20, 19, 18, 17, 16, 15, 14, 13, 12, 11, 10, 9, 8, 7, 6, 5, 4, 3, 2, or 1 amino acid variation) as compared with the VL as set forth in SEQ ID NO: 205.

[0414] In some embodiments, the humanized anti-TfR antibody comprises a humanized VH comprising a CDR-H1 having the amino acid sequence of SEQ ID NO: 199 (according to the Chothia definition system), a CDR-H2 having the amino acid sequence of SEQ ID NO: 200 (according to the Chothia definition system), a CDR-H3 having the amino acid sequence of SEQ ID NO: 201 (according to the Chothia definition system), a CDR-L1 having the amino acid sequence of SEQ ID NO: 202 (according to the Chothia definition system), a CDR-L2 having the amino acid sequence of SEQ ID NO: 192 (according to the Chothia definition system), and a CDR-L3 having the amino acid sequence of SEQ ID NO: 203 (according to the Chothia definition system), wherein the humanized VH comprises an amino acid sequence that is at least 75% (e.g., 75%, 80%, 85%, 90%, 95%, 98%, or 99%) identical to the VH as set forth in SEQ ID NO: 204, and the humanized VL comprises an amino acid sequence that is at least 75% (e.g., 75%, 80%, 85%, 90%, 95%, 98%, or 99%) identical to the VL as set forth in SEQ ID NO: 205.

[0415] In some embodiments, the humanized anti-TfR antibody comprises a CDR-H1 having the amino acid sequence of SEQ ID NO: 199 (according to the Chothia definition system), a CDR-H2 having the amino acid sequence of SEQ ID NO: 200 (according to the Chothia definition system), a CDR-H3 having the amino acid sequence of SEQ ID NO: 201 (according to the Chothia definition system), a CDR-L1 having the amino acid sequence of SEQ ID NO: 202 (according to the Chothia definition system), a CDR-L2 having the amino acid sequence of SEQ ID NO: 192 (according to the Chothia definition system), and a CDR-L3 having the amino acid sequence of SEQ ID NO: 203 (according to the Chothia definition system), wherein the humanized VH contains no more than 25 amino acid variations (e.g., no more than 25, 24, 23, 22, 21, 20, 19, 18, 17, 16, 15, 14, 13, 12, 11, 10, 9, 8, 7, 6, 5, 4, 3, 2, or 1 amino acid variation) as compared with the VH as set forth in SEQ ID NO: 204, and the humanized VL contains no more than 25 amino acid variations (e.g., no more than 25, 24, 23, 22, 21, 20, 19, 18, 17, 16, 15, 14, 13, 12, 11, 10, 9, 8, 7, 6, 5, 4, 3, 2, or 1 amino acid variation) as compared with the VL as set forth in SEQ ID NO: 205.

[0416] In some embodiments, the humanized anti-TfR antibody comprises a VH comprising the amino acid sequence of SEQ ID NO: 204. Alternatively or in addition (e.g., in addition), the humanized anti-TfR antibody comprises a VL comprising the amino acid sequence of SEQ ID NO: 205.

[0417] In some embodiments, the anti-TfR antibody is an IgG, a Fab fragment, a F(ab′) fragment, a F(ab′)₂ fragment, a scFv, or an scFv fused to a constant region (e.g., N- or C-terminal fusion). Non-limiting examples of anti-TfR antibodies in different formats are provided herein.

[0418] In some embodiments, the anti-TfRl antibody is a single-chain fragment variable (scFv) comprising the VH and VL in a single polypeptide chain. In some embodiments, the scFv comprises any one of the heavy chain CDRs, light chain CDRs, VHs, and/or (e.g., and) VLs described herein on a single polypeptide chain. In some embodiments, the scFv comprises the VH linked at the N-terminus of the VL. In some embodiments, the scFv comprises the VL linked at the N-terminus of the VH. In some embodiments, the VH and VL are linked via a linker (e.g., a polypeptide linker). Any polypeptide linker can be used for linking the VH and VL in the scFv. Selection of a linker sequence is within the abilities of those skilled in the art.

[0419] In some embodiments, the scFv comprises a VH (e.g., a humanized VH) comprising a CDR-H1 having the amino acid sequence of SEQ ID NO: 188 (according to the IMGT definition system), a CDR-H2 having the amino acid sequence of SEQ ID NO: 189 (according to the IMGT definition system), a CDR-H3 having the amino acid sequence of SEQ ID NO: 190 (according to the IMGT definition system); and a VL (e.g., a humanized VL) comprising a CDR-L1 having the amino acid sequence of SEQ ID NO: 191 (according to the IMGT definition system), a CDR-L2 having the amino acid sequence of SEQ ID NO: 192 (according to the IMGT definition system), and a CDR-L3 having the amino acid sequence of SEQ ID NO: 193 (according to the IMGT definition system), wherein the VH and VL are on a single polypeptide chain (e.g., linked via an amide bond or linked via a linker such as a peptide linker), and wherein the VH is linked to the N-terminus or the C-terminus of the VL. In some embodiments, the VH and VL are linked via a linker comprising the amino acid sequence of EGKSSGSGSESKAS (SEQ ID NO: 215).

[0420] In some embodiments, the scFv comprises a VH (e.g., a humanized VH) comprising a CDR-H1 having the amino acid sequence of SEQ ID NO: 194 (according to the Kabat definition system), a CDR-H2 having the amino acid sequence of SEQ ID NO: 195 (according to the Kabat definition system), a CDR-H3 having the amino acid sequence of SEQ ID NO: 196 (according to the Kabat definition system); and a VL (e.g., a humanized VL) comprising a CDR-L1 having the amino acid sequence of SEQ ID NO: 197 (according to the Kabat definition system), a CDR-L2 having the amino acid sequence of SEQ ID NO: 198 (according to the Kabat definition system), and a CDR-L3 having the amino acid sequence of SEQ ID NO: 193 (according to the Kabat definition system), wherein the VH and VL are on a single polypeptide chain (e.g., linked via an amide bond or linked via a linker such as a peptide linker), and wherein the VH is linked to the N-terminus or the C-terminus of the VL. In some embodiments, the VH and VL are linked via a linker comprising the amino acid sequence of EGKSSGSGSESKAS (SEQ ID NO: 215).

[0421] In some embodiments, the scFv comprises a VH (e.g., a humanized VH) comprising a CDR-H1 having the amino acid sequence of SEQ ID NO: 199 (according to the Chothia definition system), a CDR-H2 having the amino acid sequence of SEQ ID NO: 200 (according to the Chothia definition system), a CDR-H3 having the amino acid sequence of SEQ ID NO: 201 (according to the Chothia definition system); and a VL (e.g., a humanized VL) comprising a CDR-L1 having the amino acid sequence of SEQ ID NO: 202 (according to the Chothia definition system), a CDR-L2 having the amino acid sequence of SEQ ID NO: 192 (according to the Chothia definition system), and a CDR-L3 having the amino acid sequence of SEQ ID NO: 203 (according to the Chothia definition system), wherein the VH and VL are on a single polypeptide chain (e.g., linked via an amide bond or linked via a linker such as a peptide linker), and wherein the VH is linked to the N-terminus or the C-terminus of the VL. In some embodiments, the VH and VL are linked via a linker comprising the amino acid sequence of EGKSSGSGSESKAS (SEQ ID NO: 215).

[0422] In some embodiments, the scFV comprises a VH (e.g., a humanized VH) comprising an amino acid sequence that is at least 75% (e.g., 75%, 80%, 85%, 90%, 95%, 98%, or 99%) identical to the VH as set forth in SEQ ID NO: 204 and a VL (e.g., a humanized VL) comprising an amino acid sequence that is at least 75% (e.g., 75%, 80%, 85%, 90%, 95%, 98%, or 99%) identical to the VL as set forth in SEQ ID NO: 205, wherein the VH and VL are in a single polypeptide chain (e.g., linked via an amide bond or linked via a linker such as a peptide linker), and wherein the VH is linked to the N-terminus or the C-terminus of the VL. In some embodiments, the VH and VL are linked via a linker comprising the amino acid sequence of EGKSSGSGSESKAS (SEQ ID NO: 215).

[0423] In some embodiments, the scFV comprises a VH (e.g., a humanized VH) that contains no more than 25 amino acid variations (e.g., no more than 25, 24, 23, 22, 21, 20, 19, 18, 17, 16, 15, 14, 13, 12, 11, 10, 9, 8, 7, 6, 5, 4, 3, 2, or 1 amino acid variation) as compared with the VH as set forth in SEQ ID NO: 204, and a humanized VL (e.g., a humanized VL) that contains no more than 25 amino acid variations (e.g., no more than 25, 24, 23, 22, 21, 20, 19, 18, 17, 16, 15, 14, 13, 12, 11, 10, 9, 8, 7, 6, 5, 4, 3, 2, or 1 amino acid variation) as compared with the VL as set forth in SEQ ID NO: 205, wherein the VH and VL are in a single polypeptide chain (e.g., linked via an amide bond or linked via a linker such as a peptide linker), and wherein the VH is linked to the N-terminus or the C-terminus of the VL. In some embodiments, the VH and VL are linked via a linker comprising the amino acid sequence of EGKSSGSGSESKAS (SEQ ID NO: 215).

[0424] In some embodiments, the scFV comprises a VH comprising the amino acid sequence of SEQ ID NO: 204 and a VL comprising the amino acid sequence of SEQ ID NO: 205, wherein the VH and VL are in a single polypeptide chain (e.g., linked via an amide bond or linked via a linker such as a peptide linker), and wherein the VH is linked to the N-terminus or the C-terminus of the VL. In some embodiments, the VH and VL are linked via a linker comprising the amino acid sequence of EGKSSGSGSESKAS (SEQ ID NO: 215).

[0425] In some embodiments, the scFv comprises a VH comprising the amino acid sequence of SEQ ID NO: 204 linked to the N-terminus of a VL comprising the amino acid sequence of SEQ ID NO: 205. In some embodiments, the VH and VL are linked via a linker comprising the amino acid sequence of EGKSSGSGSESKAS (SEQ ID NO: 215).

[0426] In some embodiments, the scFv comprises a VH comprising the amino acid sequence of SEQ ID NO: 204 linked to the C-terminus of a VL comprising the amino acid sequence of SEQ ID NO: 205. In some embodiments, the VH and VL are linked via a linker comprising the amino acid sequence of EGKSSGSGSESKAS (SEQ ID NO: 215).

[0427] The amino acid sequence of an example of a scFV is provided below (VL-linker-VH):

DIOMTOSPSSLSASVGDRVTITCRASOSISSYLNWYOOKPGKAPKLLIYA
ASSLOSGVPSRFSGSGSGTDFTLTISSLOPEDFATYYCOOSYSTPLTFGG
GTKVEIKEGKSSGSGSESKASOVOLVOSGAEVKKPGESLKISCKGSGYSF
TSYWIGWVROMPGKGLEWMGIIYPGDSDTRYSPSFOGOVTISADKSISTA
YLOWSSLKASDTAMYYCARFPYDSSGYYSFDYWGQGTLVTVSS (SEQ I
D NO: 206)

[0428] In some embodiments, the scFv described herein comprises an amino acid sequence that is at least 75% (e.g., 75%, 80%, 85%, 90%, 95%, 98%, or 99%) identical to the VH as set forth in SEQ ID NO: 206. In some embodiments, the scFv described herein comprises an amino acid sequence that contains no more than 25 amino acid variations (e.g., no more than 25, 24, 23, 22, 21, 20, 19, 18, 17, 16, 15, 14, 13, 12, 11, 10, 9, 8, 7, 6, 5, 4, 3, 2, or 1 amino acid variation) as compared with SEQ ID NO: 206. In some embodiments, the scFv comprises the amino acid sequence of SEQ ID NO: 206.

[0429] In some embodiments, the anti-TfR antibody described herein comprises an scFv (e.g., any one of the scFv described herein) linked to a constant region. In some embodiments, the Fc region is a fragment crystallizable region (Fc region). The Fc region is a fragment of a heavy chain constant region that interacts with cell surface receptors called Fc receptors. Any known Fc regions may be used in accordance with the present disclosure and be fused to any one of the scFv described herein. The amino acid sequence of an example of a Fc region is provided below:

PKSCDKTHTCPPCPAPELLGGPSVFLFPPKPKDTLMISRTPEVTCVVVDV
SHEDPEVKFNWYVDGVEVHNAKTKPREEQYNSTYRVVSVLTVLHQDWLNG
KEYKCKVSNKALPAPIEKTISKAKGQPREPQVYTLPPSRDELTKNQVSLT
CLVKGFYPSDIAVEWESNGQPENNYKTTPPVLDSDGSFFLYSKLTVDKSR
WQQGNVFSCSVMHEALHNHYTQKSLSLSPGK (SEQ ID NO: 207)

[0430] In some embodiments, the anti-TfR antibody described herein comprises an scFv (e.g., any one of the scFv described herein or variants thereof) linked (e.g., via an amide bond or a linker such as a peptide linker) at the C-terminus to a Fc region that is at least 75% (e.g., 75%, 80%, 85%, 90%, 95%, 98%, or 99%) identical to the Fc region as set forth in SEQ ID NO: 207. In some embodiments, the anti-TfR antibody described herein comprises an scFv (e.g., any one of the scFv described herein or variants thereof) linked (e.g., via an amide bond or a linker such as a peptide linker) at the C-terminus to a Fc region that contains no more than 25 amino acid variations (e.g., no more than 25, 24, 23, 22, 21, 20, 19, 18, 17, 16, 15, 14, 13, 12, 11, 10, 9, 8, 7, 6, 5, 4, 3, 2, or 1 amino acid variation) as compared with SEQ ID NO: 207. In some embodiments, the anti-TfR antibody described herein comprises an scFv (e.g., any one of the scFv described herein or variants thereof) linked (e.g., via an amide bond or a linker such as a peptide linker) at the C-terminus to a Fc region set forth in SEQ ID NO: 207. In some embodiments, the scFV and the Fc are linked via a linker comprising the amino acid sequence of DIEGRMD (SEQ ID NO: 247).

[0431] The amino acid sequence of an example of an anti-TfR antibody comprising an scFv (e.g., any one of the scFv described herein) linked at the C-terminus to a Fc region is provided below (VL-linkerl-VH-linker2-Fc):

DIOMTOSPSSLSASVGDRVTITCRASOSISSYLNWYOOKPGKAPKLLIYA
ASSLQSGVPSRFSGSGSGTDFTLTISSLQPEDFATYYCQQSYSTPLTFGG
GTKVEIK EGKSSGSGSESKAS QVQLVOSGAEVKKPGESLKISCKGSGYSF
TSYWIGWVROMPGKGEEWMGIIYPGDSDTRYSPSFOGOVTISADKSISTA
YLOWSSLKASDTAMYYCARFPYDSSGYYSFDYWGQGTLVTVSS DIEGRMD
PKSCDKTHTCPPCPAPELLGGPSVFLFPPKPKDTLMISRTPEVTCVVVDV
SHEDPEVKFNWYVDGVEVHNAKTKPREEQYNSTYRVVSVLTVLHQDWLNG
KEYKCKVSNKALPAPIEKTISKAKGQPREPQVYTLPPSRDELTKNQVSLT
CLVKGFYPSDIAVEWESNGQPENNYKTTPPVLDSDGSFFLYSKLTVDKSR
WQQGNVFSCSVMHEALHNHYTQKSLSLSPGK
(SEQ ID NO: 208)

[0432] In some embodiments, the anti-TfR antibody described herein comprises an amino acid sequence that is at least 75% (e.g., 75%, 80%, 85%, 90%, 95%, 98%, or 99%) identical to SEQ ID NO: 208. In some embodiments, the anti-TfR antibody described herein comprises an amino acid sequence that contains no more than 25 amino acid variations (e.g., no more than 25, 24, 23, 22, 21, 20, 19, 18, 17, 16, 15, 14, 13, 12, 11, 10, 9, 8, 7, 6, 5, 4, 3, 2, or 1 amino acid variation) as compared with SEQ ID NO: 208. In some embodiments, the anti-TfR antibody comprises the amino acid sequence of SEQ ID NO: 208.

[0433] In some embodiments, the anti-TfR antibody described herein comprises an scFv (e.g., any one of the scFv described herein) linked (e.g., via an amide bond or a linker such as a peptide linker) at the N-terminus to a Fc region that is at least 75% (e.g., 75%, 80%, 85%, 90%, 95%, 98%, or 99%) identical to the Fc region as set forth in SEQ ID NO: 207. In some embodiments, the anti-TfR antibody described herein comprises an scFv (e.g., any one of the scFv described herein) linked (e.g., via an amide bond or a linker such as a peptide linker) at the N-terminus to a Fc region that contains no more than 25 amino acid variations (e.g., no more than 25, 24, 23, 22, 21, 20, 19, 18, 17, 16, 15, 14, 13, 12, 11, 10, 9, 8, 7, 6, 5, 4, 3, 2, or 1 amino acid variation) as compared with SEQ ID NO: 207. In some embodiments, the anti-TfR antibody described herein comprises an scFv (e.g., any one of the scFv described herein) linked (e.g., via an amide bond or a linker such as a peptide linker) at the N-terminus to a Fc region set forth in SEQ ID NO: 207. In some embodiments, the scFV and the Fc are linked via a linker comprising the amino acid sequence of DIEGRMD (SEQ ID NO: 247).

[0434] The amino acid sequence of an example of an anti-TfR antibody comprising an scFv (e.g., any one of the scFv described herein) linked at the N-terminus to a Fc region is provided below (Fc- linker2-VL-linker1-VH):

PKSCDKTHTCPPCPAPELLGGPSVFLFPPKPKDTLMISRTPEVTCVVVDV
SHEDPEVKFNWYVDGVEVHNAKTKPREEQYNSTYRVVSVLTVLHQDWLNG
KEYKCKVSNKALPAPIEKTISKAKGQPREPQVYTLPPSRDELTKNQVSLT
CLVKGFYPSDIAVEWESNGQPENNYKTTPPVLDSDGSFFLYSKLTVDKSR
WQQGNVFSCSVMHEALHNHYTQKSLSLSPGK DIEGRMD DIQMTQSPSSLS
ASVGDRVTITCRASQSISSYLNWYQQKPGKAPKLLIYAASSLQSGVPSRF
SGSGSGTDFTLTISSLQPEDFATYYCQQSYSTPLTFGGGTKVEIK EGKSS
GSGSESKAS QVQLVQSGAEVKKPGESLKISCKGSGYSFTSYWIGWVROMP
GKGLEWMGIIYPGDSDTRYSPSFOGOVTISADKSISTAYLOWSSLKASDT
AMYYCARFPYDSSGYYSFDYWGQGTLVTVSS (SEQ ID NO: 209)

[0435] In some embodiments, the anti-TfR antibody described herein comprises an amino acid sequence that is at least 75% (e.g., 75%, 80%, 85%, 90%, 95%, 98%, or 99%) identical to SEQ ID NO: 209. In some embodiments, the anti-TfR antibody described herein comprises an amino acid sequence that contains no more than 25 amino acid variations (e.g., no more than 25, 24, 23, 22, 21, 20, 19, 18, 17, 16, 15, 14, 13, 12, 11, 10, 9, 8, 7, 6, 5, 4, 3, 2, or 1 amino acid variation) as compared with SEQ ID NO: 209. In some embodiments, the anti-TfR antibody comprises the amino acid sequence of SEQ ID NO: 209.

[0436] In some embodiments, the anti-TfR antibody described herein is an IgG. In some embodiments, the IgG comprises a heavy chain and a light chain, wherein the heavy chain comprises the CDR-H1, CDRH2, and CDR-H3 of any one of the anti-TfR antibodies described herein, and further comprises a heavy chain constant region or a portion thereof (e.g., CH1, CH2, CH3, or a combination thereof); and wherein the light chain comprises the CDR-L1, CDRL2, and CDR-L3 of any one of the anti-TfR antibodies described herein, and further comprises a light chain constant region. In some embodiments, the IgG comprises a heavy chain and a light chain, wherein the heavy chain comprises the VH of any one of the anti-TfR antibodies described herein, and further comprises a heavy chain constant region or a portion thereof (e.g., CH1, CH2, CH3, or a combination thereof); and wherein the light chain comprises the VL of any one of the anti-TfR antibodies described herein, and further comprises a light chain constant region.

[0437] The heavy chain constant region can of any suitable origin, e.g., human, mouse, rat, or rabbit. In one specific example, the heavy chain constant region is from a human IgG (a gamma heavy chain), e.g., IgG1, IgG2, or IgG4. An example of a human IgG1 constant region is given below:

ASTKGPSVFPLAPSSKSTSGGTAALGCLVKDYFPEPVTVSWNSGALTSGV
HTFPAVLQSSGLYSLSSVVTVPSSSLGTQTYICNVNHKPSNTKVDKKVEP
KSCDKTHTCPPCPAPELLGGPSVFLFPPKPKDTLMISRTPEVTCVVVDVS
HEDPEVKFNWYVDGVEVHNAKTKPREEQYNSTYRVVSVLTVLHQDWLNGK
EYKCKVSNKALPAPIEKTISKAKGQPREPQVYTLPPSRDELTKNQVSLTC
LVKGFYPSDIAVEWESNGQPENNYKTTPPVLDSDGSFFLYSKLTVDKSRW
QQGNVFSCSVMHEALHNHYTQKSLSLSPGK (SEQ ID NO: 175)

[0438] In some embodiments, the heavy chain of any of the anti-TfR antibodies described herein comprises a mutant human IgG1 constant region. For example, the introduction of LALA mutations (a mutant derived from mAb b12 that has been mutated to replace the lower hinge residues Leu234 Leu235 with Ala234 and Ala235) in the CH2 domain of human IgG1 is known to reduce Fcg receptor binding (Bruhns, P., et al. (2009) and Xu, D. et al. (2000)). The mutant human IgG1 constant region is provided below (mutations bonded and underlined):

ASTKGPSVFPLAPSSKSTSGGTAALGCLVKDYFPEPVTVSWNSGALTSGV
HTFPAVLQSSGLYSLSSVVTVPSSSLGTQTYICNVNHKPSNTKVDKKVEP
KSCDKTHTCPPCPAPEAAGGPSVFLFPPKPKDTLMISRTPEVTCVVVDVS
HEDPEVKFNWYVDGVEVHNAKTKPREEQYNSTYRVVSVLTVLHQDWLNGK
EYKCKVSNKALPAPIEKTISKAKGQPREPQVYTLPPSRDELTKNQVSLTC
LVKGFYPSDIAVEWESNGQPENNYKTTPPVLDSDGSFFLYSKLTVDKSRW
QQGNVFSCSVMHEALHNHYTQKSLSLSPGK (SEQ ID NO: 176)

[0439] In some embodiments, the light chain constant region of any of the anti-TfR antibodies described herein can be any light chain constant region known in the art. In some examples, a kappa light chain or a lambda light chain. In some embodiments, the light chain constant region is a kappa light chain, the sequence of which is provided below:

RTVAAPSVFIFPPSDEQLKSGTASVVCLLNNFYPREAKVQWKVDNALQSG
NSQESVTEQDSKDSTYSLSSTLTLSKADYEKHKVYACEVTHQGLSSPVTK
SFNRGEC (SEQ ID NO:177)

[0440] Other antibody heavy and light chain constant regions are well known in the art, e.g., those provided in the IMGT database (www.imgt.org) or at www.vbase2.org/vbstat.php., both of which are incorporated by reference herein.

[0441] In some embodiments, the anti-TfR antibody described herein comprises a heavy chain comprising the a VH comprising the amino acid sequence of SEQ ID NO: 204 or any variants thereof and a heavy chain constant region that at least 75% (e.g., 75%, 80%, 85%, 90%, 95%, 98%, or 99%) identical to SEQ ID NO: 175 or SEQ ID NO: 176. In some embodiments, the anti-TfR antibody described herein comprises a heavy chain comprising the a VH comprising the amino acid sequence of SEQ ID NO: 204 or any variants thereof and a heavy chain constant region that contains no more than 25 amino acid variations (e.g., no more than 25, 24, 23, 22, 21, 20, 19, 18, 17, 16, 15, 14, 13, 12, 11, 10, 9, 8, 7, 6, 5, 4, 3, 2, or 1 amino acid variation) as compared with the heavy chain as set forth in SEQ ID NO: 175 or SEQ ID NO: 176.

[0442] In some embodiments, the anti-TfR antibody described herein comprises a heavy chain comprising a VH set forth in SEQ ID NO: 204 and a heavy chain constant region set forth in SEQ ID NO: 175. In some embodiments, the anti-TfR antibody described herein comprises a heavy chain comprising a VH set forth in SEQ ID NO: 204 and a heavy chain constant region as set forth in SEQ ID NO: 176.

[0443] In some embodiments, the anti-TfR antibody described herein comprises a light chain comprising a VL comprising the amino acid sequence of SEQ ID NO: 205 or any variants thereof and a light chain constant region that is at least 75% (e.g., 75%, 80%, 85%, 90%, 95%, 98%, or 99%) identical to SEQ ID NO: 177. In some embodiments, the anti-TfR antibody described herein comprises a light chain comprising a VL comprising the amino acid sequence of SEQ ID NO: 205 or any variants thereof and a light constant region that contains no more than 25 amino acid variations (e.g., no more than 25, 24, 23, 22, 21, 20, 19, 18, 17, 16, 15, 14, 13, 12, 11, 10, 9, 8, 7, 6, 5, 4, 3, 2, or 1 amino acid variation) as compared with the heavy chain as set forth in SEQ ID NO: 177.

[0444] In some embodiments, the anti-TfR antibody described herein comprises a light chain comprising a VL set forth in SEQ ID NO: 205 and a light chain constant region as set forth in SEQ ID NO: 177.

[0445] Examples of IgG heavy chain and light chain amino acid sequences of the anti-TfR antibodies described are provided below. anti-TfR IgG heavy chain (with wild type human IgG1 constant region, VH underlined)

QVQLVQSGAEVKKPGESLKISCKGSGYSFTSYWIGWVROMPGKGLEWMGI
IYPGDSDTRYSPSFQGQVTISADKSISTAYLQWSSLKASDTAMYYCARFP
YDSSGYYSFDYWGQGTLVTVSSASTKGPSVFPLAPSSKSTSGGTAALGCL
VKDYFPEPVTVSWNSGALTSGVHTFPAVLQSSGLYSLSSVVTVPSSSLGT
QTYICNVNHKPSNTKVDKKVEPKSCDKTHTCPPCPAPELLLGGPSVFLFP
PKPKDTLMISRTPEVTCVVVDVSHEDPEVKFNWYVDGVEVHNAKTKPREE
QYNSTYRVVSVLTVLHQDWLNGKEYKCKVSNKALPAPIEKTISKAKGQPR
EPQVYTLPPSRDELTKNQVSLTCLVKGFYPSDIAVEWESNGQPENNYKTT
PPVLDSDGSFFLYSKLTVDKSRWQQGNVFSCSVMHEALHNHYTQKSLSLS
PGK (SEQ ID NO: 210)

anti-TfR IgG heavy chain (with human IgG1 constant region mutant L234A/L235A, VH underlined)

QVQLVQSGAEVKKPGESLKISCKGSGYSFTSYWIGWVROMPGKGLEWMGI
IYPGDSDTRYSPSFQGQVTISADKSISTAYLQWSSLKASDTAMYYCARFP
YDSSGYYSFDYWGQGTLVTVSSASTKGPSVFPLAPSSKSTSGGTAALGCL
VKDYFPEPVTVSWNSGALTSGVHTFPAVLQSSGLYSLSSVVTVPSSSLGT
QTYICNVNHKPSNTKVDKKVEPKSCDKTHTCPPCPAPEAAGGPSVFLFPP
KPKDTLMISRTPEVTCVVVDVSHEDPEVKFNWYVDGVEVHNAKTKPREEQ
YNSTYRVVSVLTVLHQDWLNGKEYKCKVSNKALPAPIEKTISKAKGQPRE
PQVYTLPPSRDELTKNQVSLTCLVKGFYPSDIAVEWESNGQPENNYKTTP
PVLDSDGSFFLYSKLTVDKSRWQQGNVFSCSVMHEALHNHYTQKSLSLSP
GK (SEQ ID NO: 211)

anti-TfR IgG light chain (kappa, VL underlined)

DIQMTQSPSSLSASVGDRVTITCRASQSISSYLNWYQQKPGKAPKLLIYA
ASSLQSGVPSRFSGSGSGTDFTLTISSLQPEDFATYYCQQSYSTPLTFGG
GTKVEIKRTVAAPSVFIFPPSDEQLKSGTASVVCLLNNFYPREAKVQWKV
DNALQSGNSQESVTEQDSKDSTYSLSSTLTLSKADYEKHKVYACEVTHQG
LSSPVTKSFNRGEC (SEQ ID NO: 212)

[0446] In some embodiments, the anti-TfR antibody described herein comprises a heavy chain comprising an amino acid sequence that is at least 75% (e.g., 75%, 80%, 85%, 90%, 95%, 98%, or 99%) identical to SEQ ID NO: 210 or SEQ ID NO: 211. Alternatively or in addition (e.g., in addition), the anti-TfR antibody described herein comprises a light chain comprising an amino acid sequence that is at least 75% (e.g., 75%, 80%, 85%, 90%, 95%, 98%, or 99%) identical to any one of SEQ ID NOs: 212.

[0447] In some embodiments, the anti-TfR antibody of the present disclosure comprises a heavy chain containing no more than 25 amino acid variations (e.g., no more than 25, 24, 23, 22, 21, 20, 19, 18, 17, 16, 15, 14, 13, 12, 11, 10, 9, 8, 7, 6, 5, 4, 3, 2, or 1 amino acid variation) as compared with the heavy chain as set forth in SEQ ID NO: 210 or SEQ ID NO: 211. Alternatively or in addition (e.g., in addition), the anti-TfR antibody of the present disclosure comprises a light chain containing no more than 25 amino acid variations (e.g., no more than 25, 24, 23, 22, 21, 20, 19, 18, 17, 16, 15, 14, 13, 12, 11, 10, 9, 8, 7, 6, 5, 4, 3, 2, or 1 amino acid variation) as compared with the light chain as set forth in SEQ ID NO: 212.

[0448] In some embodiments, the anti-TfR antibody described herein comprises a heavy chain comprising the amino acid sequence of SEQ ID NO: 210 or SEQ ID NO: 211. Alternatively or in addition (e.g., in addition), the anti-TfR antibody described herein comprises a light chain comprising the amino acid sequence of any one of SEQ ID NO: 212.

[0449] In some embodiments, the anti-TfR antibody is a FAB fragment or F(ab′)₂ fragment of an intact antibody (full-length antibody). Antigen binding fragment of an intact antibody (full-length antibody) can be prepared via routine methods (e.g., recombinantly or by digesting the heavy chain constant region of a full length IgG using an enzyme such as papain). For example, F(ab′)₂ fragments can be produced by pepsin or papain digestion of an antibody molecule, and Fab fragments that can be generated by reducing the disulfide bridges of F(ab′)₂ fragments. In some embodiments, a heavy chain constant region in a F(ab′) fragment of the anti-TfR1 antibody described herein comprises the amino acid sequence of:

ASTKGPSVFPLAPSSKSTSGGTAALGCLVKDYFPEPVTVSWNSGALTSGV
HTFPAVLQSSGLYSLSSVVTVPSSSLGTQTYICNVNHKPSNTKVDKKVEP
KSCDKTHT (SEQ ID NO: 184)

[0450] In some embodiments, the anti-TfR antibody described herein comprises a heavy chain comprising the a VH comprising the amino acid sequence of SEQ ID NO: 204 or any variants thereof and a heavy chain constant region that at least 75% (e.g., 75%, 80%, 85%, 90%, 95%, 98%, or 99%) identical to SEQ ID NO: 184. In some embodiments, the anti-TfR antibody described herein comprises a heavy chain comprising the a VH comprising the amino acid sequence of SEQ ID NO: 204 or any variants thereof and a heavy chain constant region that contains no more than 25 amino acid variations (e.g., no more than 25, 24, 23, 22, 21, 20, 19, 18, 17, 16, 15, 14, 13, 12, 11, 10, 9, 8, 7, 6, 5, 4, 3, 2, or 1 amino acid variation) as compared with the heavy chain as set forth in SEQ ID NO: 184.

[0451] In some embodiments, the anti-TfR antibody described herein comprises a heavy chain comprising a VH set forth in SEQ ID NO: 204 and a heavy chain constant region as set forth in SEQ ID NO: 184.

[0452] Examples of F(ab′) amino acid sequences of an anti-TfR antibody described herein are provided below. anti-TfR Fab’ heavy chain (with human IgG1 constant region fragment, VH underlined)

QVQLVQSGAEVKKPGESLKISCKGSGYSFTSYWIGWVRQMPGKGLEWMGI
IYPGDSDTRYSPSFQGQVTISADKSISTAYLQWSSLKASDTAMYYCARFP
YDSSGYYSFDYWGQGTLVTVSSASTKGPSVFPLAPSSKSTSGGTAALGCL
VKDYFPEPVTVSWNSGALTSGVHTFPAVLQSSGLYSLSSVVTVPSSSLGT
QTYICNVNHKPSNTKVDKKVEPKSCDKTHTCP (SEQ ID NO: 213)

or

QVQLVQSGAEVKKPGESLKISCKGSGYSFTSYWIGWVRQMPGKGLEWMGI
IYPGDSDTRYSPSFQGQVTISADKSISTAYLQWSSLKASDTAMYYCARFP
YDSSGYYSFDYWGQGTLVTVSSASTKGPSVFPLAPSSKSTSGGTAALGCL
VKDYFPEPVTVSWNSGALTSGVHTFPAVLQSSGLYSLSSVVTVPSSSLGT
QTYICNVNHKPSNTKVDKKVEPKSCDKTHT (SEQ ID NO: 308)

anti-TfR Fab′ light chain (kappa, VL underlined)

DIQMTQSPSSLSASVGDRVTITCRASQSISSYLNWYQQKPGKAPKLLIYA
ASSLQSGVPSRFSGSGSGTDFTLTISSLOPEDFATYYCOOSYSTPLTFGG
GTKVEIKRTVAAPSVFIFPPSDEQLKSGTASVVCLLNNFYPREAKVQWKV
DNALQSGNSQESVTEQDSKDSTYSLSSTLTLSKADYEKHKVYACEVTHQG
LSSPVTKSFNRGEC (SEQ ID NO: 212)

[0453] In some embodiments, the anti-TfR antibody described herein comprises a heavy chain comprising an amino acid sequence that is at least 75% (e.g., 75%, 80%, 85%, 90%, 95%, 98%, or 99%) identical to SEQ ID NO: 213, or SEQ ID NO: 308. Alternatively or in addition (e.g., in addition), the anti-TfR antibody described herein comprises a light chain comprising an amino acid sequence that is at least 75% (e.g., 75%, 80%, 85%, 90%, 95%, 98%, or 99%) identical to SEQ ID NO: 212. In some embodiments, the anti-TfR antibody of the present disclosure comprises a heavy chain containing no more than 25 amino acid variations (e.g., no more than 25, 24, 23, 22, 21, 20, 19, 18, 17, 16, 15, 14, 13, 12, 11, 10, 9, 8, 7, 6, 5, 4, 3, 2, or 1 amino acid variation) as compared with the heavy chain as set forth in SEQ ID NO: 213, or SEQ ID NO: 308. Alternatively or in addition (e.g., in addition), the anti-TfR antibody of the present disclosure comprises a light chain containing no more than 25 amino acid variations (e.g., no more than 25, 24, 23, 22, 21, 20, 19, 18, 17, 16, 15, 14, 13, 12, 11, 10, 9, 8, 7, 6, 5, 4, 3, 2, or 1 amino acid variation) as compared with the light chain as set forth in SEQ ID NO: 212. In some embodiments, the anti-TfR antibody described herein comprises a heavy chain comprising the amino acid sequence of SEQ ID NO: 213, or SEQ ID NO: 308. Alternatively or in addition (e.g., in addition), the anti-TfR antibody described herein comprises a light chain comprising the amino acid sequence of SEQ ID NO: 212.

[0454] In some embodiments, any one of the anti-TfRl antibodies described herein may comprise a signal peptide in the heavy and/or (e.g., and) light chain sequence (e.g., a N-terminal signal peptide). In some embodiments, the anti-TfRl antibody described herein comprises any one of the VH and VL sequences, any one of the IgG heavy chain and light chain sequences listed, or any one of the F(ab′) heavy chain and light chain sequences described herein, and further comprises a signal peptide (e.g., a N-terminal signal peptide). In some embodiments, the signal peptide comprises the amino acid sequence of MGWSCIILFLVATATGVHS (SEQ ID NO: 214).

### Other Known Anti-Transferrin Receptor Antibodies

[0455] Any other appropriate anti-transferrin receptor antibodies known in the art may be used as the muscle-targeting agent in the complexes disclosed herein. Examples of known anti-transferrin receptor antibodies, including associated references and binding epitopes, are listed in Table 8. In some embodiments, the anti-transferrin receptor antibody comprises the complementarity determining regions (CDR-H1, CDR-H2, CDR-H3, CDR-L1, CDR-L2, and CDR-L3) of any of the anti-transferrin receptor antibodies provided herein, e.g., anti-transferrin receptor antibodies listed in Table 8.

TABLE 8

List of anti-transferrin receptor antibody clones, including associated references and binding epitope information

| Antibody Clone Name | | | | Reference(s) | Epitope / Notes |
|---|---|---|---|---|---|
| OKT9 | | | | U.S. Pat. No. 4,364,934, filed Dec. 4, 1979, entitled “MONOCLONAL ANTIBODY TO A HUMAN EARLY THYMOCYTE ANTIGEN AND METHODS FOR PREPARING SAME” | Apical domain of TfR (residues 305-366 of human TfR sequence XM_052730.3, available in GenBank) |
| | | | | Schneider C. et al. “Structural features of the cell surface receptor for transferrin that is recognized by the monoclonal antibody OKT9.” J Biol Chem. 1982, 257:14, 8516-8522. | |
| (From JCR) Clone M11 Clone M23 Clone M27 Clone B84 | | | | WO 2015/098989, filed Dec. 24, 2014, “Novel anti-Transferrin receptor antibody that passes through blood-brain barrier” | Apical domain (residues 230-244 and 326-347 of TfR) and protease-like domain (residues 461-473) |
| | | | | U.S. Pat. No. 9,994,641, filed Dec. 24, 2014, “Novel anti-Transferrin receptor antibody that passes through blood-brain barrier” | |
| (From Genentech) 7A4, 8A2, 15D2, 10D11, 7B10, 15G11, 16G5, 13C3, 16G4, 16F6, 7G7, 4C2, 1B12, and 13D4 | | | | WO 2016/081643, filed May 26, 2016, entitled “ANTI-TRANSFERRI N RECEPTOR ANTIBODIES AND METHODS OF USE” | Apical domain and non-apical regions |
| | | | | U.S. Pat. No. 9,708,406, filed May 20, 2014, “Anti-transferrin receptor antibodies and methods of use” | |
| (From Armagen) 8D3 | | | | Lee et al. “Targeting Rat Anti-Mouse Transferrin Receptor Monoclonal Antibodies through Blood-Brain Barrier in Mouse” 2000, J Pharmacol. Exp. Ther., 292: 1048-1052. | |
| | | | | U.S. Pat. App. 2010/077498, filed Sep. 11, 2008, entitled “COMPOSITIO NS AND METHODS FOR BLOOD-BRAIN BARRIER DELIVERY IN THE MOUSE” | |
| OX26 | | | | Haobam, B. et al. 2014. Rab 17-mediated recycling endosomes contribute to autophagosome formation in response to Group A Streptococcus invasion. Cellular microbiology. 16: 1806-21. | |
| DF1513 | | | | Ortiz-Zapater E et al. Trafficking of the human transferrin receptor in plant cells: effects of tyrphostin A23 and brefeldin A. Plant J 48:757-70 (2006). | |
| 1A1B2, 66IG10, MEM-189, JF0956, 29806, 1A1B2, TFRC/1818, 1E6, 66Ig10, TFRC/1059, Q1/71, 23D10, 13E4, TFRC/1149, ER-MP21, YTA74.4, BU54, 2B6, RI7 217 | | | | Commercially available anti-transferrin receptor antibodies. | Novus Biologicals 8100 Southpark Way, A-8 Littleton CO 80120 |
| (From INSERM) BA120g | | | | U.S. Pat. App. 2011/0311544A 1, filed Jun. 15, 2005, entitled “ANTI-CD71 MONOCLONA L ANTIBODIES AND USES THEREOF FOR TREATING MALIGNANT TUMOR CELLS” | Does not compete with OKT9 |
| LUCA31 | | | | U.S. Pat. No. 7,572,895, filed Jun. 7, 2004, entitled “TRANSFERRI N RECEPTOR ANTIBODIES” | “LUCA31 epitope” |
| (Salk Institute) B3/25 T58/30 | | | | Trowbridge, I.S. et al. “Anti-transferrin receptor monoclonal antibody and toxin-antibody conjugates affect growth of human tumour cells.” Nature, 1981, volume 294, pages 171-173 | |
| R17 217.1.3, 5E9C11, OKT9 (BE0023 clone) | | | | Commercially available anti-transferrin receptor antibodies. | BioXcell 10 Technology Dr., Suite 2B West Lebanon, NH 03784-1671 USA |
| BK19.9, B3/25, T56/14 and T58/1 | | | | Gatter, K.C. et al. “Transferrin receptors in human tissues: their distribution and possible clinical relevance.” J Clin Pathol. 1983 May;36(5):539-45. | |
| Anti-TfR antibody 15G1 | | | | | |
| CDRs listed in Table 9 | | | | | |
| VH (SEQ ID NO: 230) | | | | | |
| VL (SEQ ID NO: 231) | | | | | |
| Fab′ HC (SEQ ID NO: 240) | | | | | |
| Fab′ LC (SEQ ID NO: 237) | | | | | |
| Anti-TfR antibody | | | | | |
| CDRH1 (SEQ ID NO: 12148) | | | | | |
| CDRH2 (SEQ ID NO: 12149) | | | | | |
| CDRH3 (SEQ ID NO: 12150) | | | | | |
| CDRL1 (SEQ ID NO: 12151) | | | | | |
| CDRL2 (SEQ ID NO: 12152) | | | | | |
| CDRL3 (SEQ ID NO: 12153) | | | | | |
| VH (SEQ ID NO: 12154) | | | | | |
| VL(SEQ ID NO: 12155) | | | | | |
| Additional anti-TfR antibody SEQ ID NOs | | | | | |
| | VH/VL | CDR1 | CDR2 | CDR3 | |
| VH1 | 12164 | 12156 | 12157 | 12150 | |
| VH2 | 12165 | 12156 | 12158 | 12150 | |
| VH3 | 12166 | 12156 | 12159 | 12150 | |
| VH4 | 12167 | 12156 | 12158 | 12150 | |
| VL1 | 12168 | 12151 | 12152 | 12160 | |
| VL2 | 12169 | 12151 | 12152 | 12160 | |
| VL3 | 12170 | 12151 | 12161 | 12153 | |
| VL4 | 12171 | 12162 | 12163 | 12153 | |

[0456] In some embodiments, transferrin receptor antibodies of the present disclosure include one or more of the CDR-H (e.g., CDR-H1, CDR-H2, and CDR-H3) amino acid sequences from any one of the anti-transferrin receptor antibodies selected from Table 8. In some embodiments, transferrin receptor antibodies include the CDR-H1, CDR-H2, and CDR-H3 as provided for any one of the anti-transferrin receptor antibodies selected from Table 8. In some embodiments, anti-transferrin receptor antibodies include the CDR-L1, CDR-L2, and CDR-L3 as provided for any one of the anti-transferrin receptor antibodies selected from Table 8. In some embodiments, anti-transferrin antibodies include the CDR-H1, CDR-H2, CDR-H3, CDR-L1, CDR-L2, and CDR-L3 as provided for any one of the anti-transferrin receptor antibodies selected from Table 8. The disclosure also includes any nucleic acid sequence that encodes a molecule comprising a CDR-H1, CDR-H2, CDR-H3, CDR-L1, CDR-L2, or CDR-L3 as provided for any one of the anti-transferrin receptor antibodies selected from Table 8. In some embodiments, antibody heavy and light chain CDR3 domains may play a particularly important role in the binding specificity/affinity of an antibody for an antigen. Accordingly, anti-transferrin receptor antibodies of the disclosure may include at least the heavy and/or (e.g., and) light chain CDR3s of any one of the anti-transferrin receptor antibodies selected from Table 8.

[0457] In some examples, any of the anti- transferrin receptor antibodies of the disclosure have one or more CDR (e.g., CDR-H or CDR-L) sequences substantially similar to any of the CDR-H1, CDR-H2, CDR-H3, CDR-L1, CDR-L2, and/or (e.g., and) CDR-L3 sequences from one of the anti-transferrin receptor antibodies selected from Table 8. In some embodiments, the position of one or more CDRs along the VH (e.g., CDR-H1, CDR-H2, or CDR-H3) and/or (e.g., and) VL (e.g., CDR-L1, CDR-L2, or CDR-L3) region of an antibody described herein can vary by one, two, three, four, five, or six amino acid positions so long as immunospecific binding to transferrin receptor (e.g., human transferrin receptor) is maintained (e.g., substantially maintained, for example, at least 50%, at least 60%, at least 70%, at least 80%, at least 90%, at least 95% of the binding of the original antibody from which it is derived). For example, in some embodiments, the position defining a CDR of any antibody described herein can vary by shifting the N-terminal and/or (e.g., and) C-terminal boundary of the CDR by one, two, three, four, five, or six amino acids, relative to the CDR position of any one of the antibodies described herein, so long as immunospecific binding to transferrin receptor (e.g., human transferrin receptor) is maintained (e.g., substantially maintained, for example, at least 50%, at least 60%, at least 70%, at least 80%, at least 90%, at least 95% of the binding of the original antibody from which it is derived). In another embodiment, the length of one or more CDRs along the VH (e.g., CDR-H1, CDR-H2, or CDR-H3) and/or (e.g., and) VL (e.g., CDR-L1, CDR-L2, or CDR-L3) region of an antibody described herein can vary (e.g., be shorter or longer) by one, two, three, four, five, or more amino acids, so long as immunospecific binding to transferrin receptor (e.g., human transferrin receptor) is maintained (e.g., substantially maintained, for example, at least 50%, at least 60%, at least 70%, at least 80%, at least 90%, at least 95% of the binding of the original antibody from which it is derived).

[0458] Accordingly, in some embodiments, a CDR-L1, CDR-L2, CDR-L3, CDR-H1, CDR-H2, and/or (e.g., and) CDR-H3 described herein may be one, two, three, four, five or more amino acids shorter than one or more of the CDRs described herein (e.g., CDRS from any of the anti-transferrin receptor antibodies selected from Table 8) so long as immunospecific binding to transferrin receptor (e.g., human transferrin receptor) is maintained (e.g., substantially maintained, for example, at least 50%, at least 60%, at least 70%, at least 80%, at least 90%, at least 95% relative to the binding of the original antibody from which it is derived). In some embodiments, a CDR-L1, CDR-L2, CDR-L3, CDR-H1, CDR-H2, and/or (e.g., and) CDR-H3 described herein may be one, two, three, four, five or more amino acids longer than one or more of the CDRs described herein (e.g., CDRS from any of the anti-transferrin receptor antibodies selected from Table 8) so long as immunospecific binding to transferrin receptor (e.g., human transferrin receptor) is maintained (e.g., substantially maintained, for example, at least 50%, at least 60%, at least 70%, at least 80%, at least 90%, at least 95% relative to the binding of the original antibody from which it is derived). In some embodiments, the amino portion of a CDR-L1, CDR-L2, CDR-L3, CDR-H1, CDR-H2, and/or (e.g., and) CDR-H3 described herein can be extended by one, two, three, four, five or more amino acids compared to one or more of the CDRs described herein (e.g., CDRS from any of the anti-transferrin receptor antibodies selected from Table 8) so long as immunospecific binding to transferrin receptor (e.g., human transferrin receptor is maintained (e.g., substantially maintained, for example, at least 50%, at least 60%, at least 70%, at least 80%, at least 90%, at least 95% relative to the binding of the original antibody from which it is derived). In some embodiments, the carboxy portion of a CDR-L1, CDR-L2, CDR-L3, CDR-H1, CDR-H2, and/or (e.g., and) CDR-H3 described herein can be extended by one, two, three, four, five or more amino acids compared to one or more of the CDRs described herein (e.g., CDRS from any of the anti-transferrin receptor antibodies selected from Table 8) so long as immunospecific binding to transferrin receptor (e.g., human transferrin receptor) is maintained (e.g., substantially maintained, for example, at least 50%, at least 60%, at least 70%, at least 80%, at least 90%, at least 95% relative to the binding of the original antibody from which it is derived). In some embodiments, the amino portion of a CDR-L1, CDR-L2, CDR-L3, CDR-H1, CDR-H2, and/or (e.g., and) CDR-H3 described herein can be shortened by one, two, three, four, five or more amino acids compared to one or more of the CDRs described herein (e.g., CDRS from any of the anti-transferrin receptor antibodies selected from Table 8) so long as immunospecific binding to transferrin receptor (e.g., human transferrin receptor) is maintained (e.g., substantially maintained, for example, at least 50%, at least 60%, at least 70%, at least 80%, at least 90%, at least 95% relative to the binding of the original antibody from which it is derived). In some embodiments, the carboxy portion of a CDR-L1, CDR-L2, CDR-L3, CDR-H1, CDR-H2, and/or (e.g., and) CDR-H3 described herein can be shortened by one, two, three, four, five or more amino acids compared to one or more of the CDRs described herein (e.g., CDRS from any of the anti-transferrin receptor antibodies selected from Table 8) so long as immunospecific binding to transferrin receptor (e.g., human transferrin receptor) is maintained (e.g., substantially maintained, for example, at least 50%, at least 60%, at least 70%, at least 80%, at least 90%, at least 95% relative to the binding of the original antibody from which it is derived). Any method can be used to ascertain whether immunospecific binding to transferrin receptor (e.g., human transferrin receptor) is maintained, for example, using binding assays and conditions described in the art.

[0459] In some examples, any of the anti-transferrin receptor antibodies of the disclosure have one or more CDR (e.g., CDR-H or CDR-L) sequences substantially similar to any one of the anti-transferrin receptor antibodies selected from Table 8. For example, the antibodies may include one or more CDR sequence(s) from any of the anti-transferrin receptor antibodies selected from Table 8 containing up to 5, 4, 3, 2, or 1 amino acid residue variations as compared to the corresponding CDR region in any one of the CDRs provided herein (e.g., CDRs from any of the anti-transferrin receptor antibodies selected from Table 8) so long as immunospecific binding to transferrin receptor (e.g., human transferrin receptor) is maintained (e.g., substantially maintained, for example, at least 50%, at least 60%, at least 70%, at least 80%, at least 90%, at least 95% relative to the binding of the original antibody from which it is derived). In some embodiments, any of the amino acid variations in any of the CDRs provided herein may be conservative variations. Conservative variations can be introduced into the CDRs at positions where the residues are not likely to be involved in interacting with a transferrin receptor protein (e.g., a human transferrin receptor protein), for example, as determined based on a crystal structure. Some aspects of the disclosure provide transferrin receptor antibodies that comprise one or more of the heavy chain variable (VH) and/or (e.g., and) light chain variable (VL) domains provided herein. In some embodiments, any of the VH domains provided herein include one or more of the CDR-H sequences (e.g., CDR-H1, CDR-H2, and CDR-H3) provided herein, for example, any of the CDR-H sequences provided in any one of the anti-transferrin receptor antibodies selected from Table 8. In some embodiments, any of the VL domains provided herein include one or more of the CDR-L sequences (e.g., CDR-L1, CDR-L2, and CDR-L3) provided herein, for example, any of the CDR-L sequences provided in any one of the anti-transferrin receptor antibodies selected from Table 8.

[0460] In some embodiments, anti-transferrin receptor antibodies of the disclosure include any antibody that includes a heavy chain variable domain and/or (e.g., and) a light chain variable domain of any anti-transferrin receptor antibody, such as any one of the anti-transferrin receptor antibodies selected from Table 8. In some embodiments, anti-transferrin receptor antibodies of the disclosure include any antibody that includes the heavy chain variable and light chain variable pairs of any anti-transferrin receptor antibody, such as any one of the anti-transferrin receptor antibodies selected from Table 8.

[0461] Aspects of the disclosure provide anti-transferrin receptor antibodies having a heavy chain variable (VH) and/or (e.g., and) a light chain variable (VL) domain amino acid sequence homologous to any of those described herein. In some embodiments, the anti-transferrin receptor antibody comprises a heavy chain variable sequence or a light chain variable sequence that is at least 75% (e.g., 80%, 85%, 90%, 95%, 98%, or 99%) identical to the heavy chain variable sequence and/ or any light chain variable sequence of any anti-transferrin receptor antibody, such as any one of the anti-transferrin receptor antibodies selected from Table 8. In some embodiments, the homologous heavy chain variable and/or (e.g., and) a light chain variable amino acid sequences do not vary within any of the CDR sequences provided herein. For example, in some embodiments, the degree of sequence variation (e.g., 75%, 80%, 85%, 90%, 95%, 98%, or 99%) may occur within a heavy chain variable and/or (e.g., and) a light chain variable sequence excluding any of the CDR sequences provided herein. In some embodiments, any of the anti-transferrin receptor antibodies provided herein comprise a heavy chain variable sequence and a light chain variable sequence that comprises a framework sequence that is at least 75%, 80%, 85%, 90%, 95%, 98%, or 99% identical to the framework sequence of any anti-transferrin receptor antibody, such as any one of the anti-transferrin receptor antibodies selected from Table 8.

[0462] In some embodiments, an anti-transferrin receptor antibody, which specifically binds to transferrin receptor (e.g., human transferrin receptor), comprises a light chain variable VL domain comprising any of the CDR-L domains (CDR-L1, CDR-L2, and CDR-L3), or CDR-L domain variants provided herein, of any of the anti-transferrin receptor antibodies selected from Table 8. In some embodiments, an anti-transferrin receptor antibody, which specifically binds to transferrin receptor (e.g., human transferrin receptor), comprises a light chain variable VL domain comprising the CDR-L1, the CDR-L2, and the CDR-L3 of any anti-transferrin receptor antibody, such as any one of the anti-transferrin receptor antibodies selected from Table 8. In some embodiments, the anti-transferrin receptor antibody comprises a light chain variable (VL) region sequence comprising one, two, three or four of the framework regions of the light chain variable region sequence of any anti-transferrin receptor antibody, such as any one of the anti-transferrin receptor antibodies selected from Table 8. In some embodiments, the anti-transferrin receptor antibody comprises one, two, three or four of the framework regions of a light chain variable region sequence which is at least 75%, 80%, 85%, 90%, 95%, or 100% identical to one, two, three or four of the framework regions of the light chain variable region sequence of any anti-transferrin receptor antibody, such as any one of the anti-transferrin receptor antibodies selected from Table 8. In some embodiments, the light chain variable framework region that is derived from said amino acid sequence consists of said amino acid sequence but for the presence of up to 10 amino acid substitutions, deletions, and/or (e.g., and) insertions, preferably up to 10 amino acid substitutions. In some embodiments, the light chain variable framework region that is derived from said amino acid sequence consists of said amino acid sequence with 1, 2, 3, 4, 5, 6, 7, 8, 9 or 10 amino acid residues being substituted for an amino acid found in an analogous position in a corresponding non-human, primate, or human light chain variable framework region.

[0463] In some embodiments, an anti-transferrin receptor antibody that specifically binds to transferrin receptor comprises the CDR-L1, the CDR-L2, and the CDR-L3 of any anti-transferrin receptor antibody, such as any one of the anti-transferrin receptor antibodies selected from Table 8. In some embodiments, the antibody further comprises one, two, three or all four VL framework regions derived from the VL of a human or primate antibody. The primate or human light chain framework region of the antibody selected for use with the light chain CDR sequences described herein, can have, for example, at least 70% (e.g., at least 75%, 80%, 85%, 90%, 95%, 98%, or at least 99%) identity with a light chain framework region of a non-human parent antibody. The primate or human antibody selected can have the same or substantially the same number of amino acids in its light chain complementarity determining regions to that of the light chain complementarity determining regions of any of the antibodies provided herein, e.g., any of the anti-transferrin receptor antibodies selected from Table 8. In some embodiments, the primate or human light chain framework region amino acid residues are from a natural primate or human antibody light chain framework region having at least 75% identity, at least 80% identity, at least 85% identity, at least 90% identity, at least 95% identity, at least 98% identity, at least 99% (or more) identity with the light chain framework regions of any anti-transferrin receptor antibody, such as any one of the anti-transferrin receptor antibodies selected from Table 8. In some embodiments, an anti-transferrin receptor antibody further comprises one, two, three or all four VL framework regions derived from a human light chain variable kappa subfamily. In some embodiments, an anti-transferrin receptor antibody further comprises one, two, three or all four VL framework regions derived from a human light chain variable lambda subfamily.

[0464] In some embodiments, any of the anti-transferrin receptor antibodies provided herein comprise a light chain variable domain that further comprises a light chain constant region. In some embodiments, the light chain constant region is a kappa, or a lambda light chain constant region. In some embodiments, the kappa or lambda light chain constant region is from a mammal, e.g., from a human, monkey, rat, or mouse. In some embodiments, the light chain constant region is a human kappa light chain constant region. In some embodiments, the light chain constant region is a human lambda light chain constant region. It should be appreciated that any of the light chain constant regions provided herein may be variants of any of the light chain constant regions provided herein. In some embodiments, the light chain constant region comprises an amino acid sequence that is at least 75%, 80%, 85%, 90%, 95%, 98%, or 99% identical to any of the light chain constant regions of any anti-transferrin receptor antibody, such as any one of the anti-transferrin receptor antibodies selected from Table 8.

[0465] In some embodiments, the anti-transferrin receptor antibody is any anti-transferrin receptor antibody, such as any one of the anti-transferrin receptor antibodies selected from Table 8.

[0466] In some embodiments, an anti-transferrin receptor antibody comprises a VL domain comprising the amino acid sequence of any anti-transferrin receptor antibody, such as any one of the anti-transferrin receptor antibodies selected from Table 8, and wherein the constant regions comprise the amino acid sequences of the constant regions of an IgG, IgE, IgM, IgD, IgA or IgY immunoglobulin molecule, or a human IgG, IgE, IgM, IgD, IgA or IgY immunoglobulin molecule. In some embodiments, an anti-transferrin receptor antibody comprises any of the VL domains, or VL domain variants, and any of the VH domains, or VH domain variants, wherein the VL and VH domains, or variants thereof, are from the same antibody clone, and wherein the constant regions comprise the amino acid sequences of the constant regions of an IgG, IgE, IgM, IgD, IgA or IgY immunoglobulin molecule, any class (e.g., IgG1, IgG2, IgG3, IgG4, IgA1 and IgA2), or any subclass (e.g., IgG2a and IgG2b) of immunoglobulin molecule. Non-limiting examples of human constant regions are described in the art, e.g., see Kabat E A et al., (1991) supra.

[0467] In some embodiments, the muscle-targeting agent is a transferrin receptor antibody (e.g., the antibody and variants thereof as described in International Application Publication WO 2016/081643, incorporated herein by reference).

[0468] The heavy chain and light chain CDRs of the antibody according to different definition systems are provided in Table 9. The different definition systems, e.g., the Kabat definition, the Chothia definition, and/or (e.g., and) the contact definition have been described. See, e.g., (e.g., Kabat, E.A., et al. (1991) Sequences of Proteins of Immunological Interest, Fifth Edition, U.S. Department of Health and Human Services, NIH Publication No. 91-3242, Chothia et al., (1989) Nature 342:877; Chothia, C. et al. (1987) J. Mol. Biol. 196:901-917, Allazikani et al (1997) J. Molec. Biol. 273:927-948; and Almagro, J. Mol. Recognit. 17:132-143 (2004). See also hgmp.mrc.ac.uk and bioinf.org.uk/abs).

TABLE 9

Heavy chain and light chain CDRs of a mouse transferrin receptor antibody

| | | | |
|---|---|---|---|
| CDRs | Kabat | Chothia | Contact |
| CDR-H1 | SYWMH (SEQ ID NO: 216) | GYTFTSY (SEQ ID NO: 222) | TSYWMH (SEQ ID NO: 224) |
| CDR-H2 | EINPTNGRTNYIEKFKS (SEQ ID NO: 217) | NPTNGR (SEQ ID NO: 223) | WIGEINPTNGRTN (SEQ ID NO: 225) |
| CDR-H3 | GTRAYHY (SEQ ID NO: 218) | GTRAYHY (SEQ ID NO: 218) | ARGTRA (SEQ ID NO: 226) |
| CDR-L1 | RASDNLYSNLA (SEQ ID NO: 219) | RASDNLYSNLA (SEQ ID NO: 219) | YSNLAWY (SEQ ID NO: 227) |
| CDR-L2 | DATNLAD (SEQ ID NO: 220) | DATNLAD (SEQ ID NO: 220) | LLVYDATNLA (SEQ ID NO: 228) |
| CDR-L3 | QHFWGTPLT (SEQ ID NO: 221) | QHFWGTPLT (SEQ ID NO: 221) | QHFWGTPL (SEQ ID NO: 229) |

[0469] The heavy chain variable domain (VH) and light chain variable domain sequences are also provided:

[0470] VH

QVQLQQPGAELVKPGASVKLSCKASGYTFTSYWMHWVKQRPGQGLEWIGE
INPTNGRTNYIEKFKSKATLTVDKSSSTAYMQLSSLTSEDSAVYYCARGT
RAYHYWGQGTSVTVSS (SEQ ID NO: 230)

[0471] VL

DIQMTQSPASLSVSVGETVTITCRASDNLYSNLAWYQQKQGKSPQLLVYD
ATNLADGVPSRFSGSGSGTQYSLKINSLQSEDFGTYYCQHFWGTPLTFGA
GTKLELK (SEQ ID NO:231)

[0472] In some embodiments, the transferrin receptor antibody of the present disclosure comprises a CDR-H1, a CDR-H2, and a CDR-H3 that are the same as the CDR-H1, CDR-H2, and CDR-H3 shown in Table 9. Alternatively or in addition (e.g., in addition), the transferrin receptor antibody of the present disclosure comprises a CDR-L1, a CDR-L2, and a CDR-L3 that are the same as the CDR-L1, CDR-L2, and CDR-L3 shown in Table 9.

[0473] In some embodiments, the transferrin receptor antibody of the present disclosure comprises a CDR-H1, a CDR-H2, and a CDR-H3, which collectively contains no more than 5 amino acid variations (e.g., no more than 5, 4, 3, 2, or 1 amino acid variation) as compared with the CDR-H1, CDR-H2, and CDR-H3 as shown in Table 9. “Collectively” means that the total number of amino acid variations in all of the three heavy chain CDRs is within the defined range. Alternatively or in addition (e.g., in addition), the transferrin receptor antibody of the present disclosure may comprise a CDR-L1, a CDR-L2, and a CDR-L3, which collectively contains no more than 5 amino acid variations (e.g., no more than 5, 4, 3, 2 or 1 amino acid variation) as compared with the CDR-L1, CDR-L2, and CDR-L3 as shown in Table 9.

[0474] In some embodiments, the transferrin receptor antibody of the present disclosure comprises a CDR-H1, a CDR-H2, and a CDR-H3, at least one of which contains no more than 3 amino acid variations (e.g., no more than 3, 2, or 1 amino acid variation) as compared with the counterpart heavy chain CDR as shown in Table 9. Alternatively or in addition (e.g., in addition), the transferrin receptor antibody of the present disclosure may comprise CDR-L1, a CDR-L2, and a CDR-L3, at least one of which contains no more than 3 amino acid variations (e.g., no more than 3, 2, or 1 amino acid variation) as compared with the counterpart light chain CDR as shown in Table 9.

[0475] In some embodiments, the transferrin receptor antibody of the present disclosure comprises a CDR-L3, which contains no more than 3 amino acid variations (e.g., no more than 3, 2, or 1 amino acid variation) as compared with the CDR-L3 as shown in Table 9. In some embodiments, the transferrin receptor antibody of the present disclosure comprises a CDR-L3 containing one amino acid variation as compared with the CDR-L3 as shown in Table 9. In some embodiments, the transferrin receptor antibody of the present disclosure comprises a CDR-L3 of QHFAGTPLT (SEQ ID NO: 232) according to the Kabat and Chothia definition system) or QHFAGTPL (SEQ ID NO: 233) according to the Contact definition system). In some embodiments, the transferrin receptor antibody of the present disclosure comprises a CDR-H1, a CDR-H2, a CDR-H3, a CDR-L1 and a CDR-L2 that are the same as the CDR-H1, CDR-H2, and CDR-H3 shown in Table 9, and comprises a CDR-L3 of QHFAGTPLT (SEQ ID NO: 232) according to the Kabat and Chothia definition system) or QHFAGTPL (SEQ ID NO: 233) according to the Contact definition system).

[0476] In some embodiments, the transferrin receptor antibody of the present disclosure comprises heavy chain CDRs that collectively are at least 80% (e.g., 80%, 85%, 90%, 95%, or 98%) identical to the heavy chain CDRs as shown in Table 9. Alternatively or in addition (e.g., in addition), the transferrin receptor antibody of the present disclosure comprises light chain CDRs that collectively are at least 80% (e.g., 80%, 85%, 90%, 95%, or 98%) identical to the light chain CDRs as shown in Table 9.

[0477] In some embodiments, the transferrin receptor antibody of the present disclosure comprises a VH comprising the amino acid sequence of SEQ ID NO: 230. Alternatively or in addition (e.g., in addition), the transferrin receptor antibody of the present disclosure comprises a VL comprising the amino acid sequence of SEQ ID NO: 231.

[0478] In some embodiments, the transferrin receptor antibody of the present disclosure comprises a VH containing no more than 25 amino acid variations (e.g., no more than 25, 24, 23, 22, 21, 20, 19, 18, 17, 16, 15, 14, 13, 12, 11, 10, 9, 8, 7, 6, 5, 4, 3, 2, or 1 amino acid variation) as compared with the VH as set forth in SEQ ID NO: 230. Alternatively or in addition (e.g., in addition), the transferrin receptor antibody of the present disclosure comprises a VL containing no more than 15 amino acid variations (e.g., no more than 20, 19, 18, 17, 16, 15, 14, 13, 12, 11, 9, 8, 7, 6, 5, 4, 3, 2, or 1 amino acid variation) as compared with the VL as set forth in SEQ ID NO: 231.

[0479] In some embodiments, the transferrin receptor antibody of the present disclosure comprises a VH comprising an amino acid sequence that is at least 80% (e.g., 80%, 85%, 90%, 95%, or 98%) identical to the VH as set forth in SEQ ID NO: 230. Alternatively or in addition (e.g., in addition), the transferrin receptor antibody of the present disclosure comprises a VL comprising an amino acid sequence that is at least 80% (e.g., 80%, 85%, 90%, 95%, or 98%) identical to the VL as set forth in SEQ ID NO: 231.

[0480] In some embodiments, the transferrin receptor antibody of the present disclosure is a humanized antibody (e.g., a humanized variant of an antibody). In some embodiments, the transferrin receptor antibody of the present disclosure comprises a CDR-H1, a CDR-H2, a CDR-H3, a CDR-L1, a CDR-L2, and a CDR-L3 that are the same as the CDR-H1, CDR-H2, and CDR-H3 shown in Table 9, and comprises a humanized heavy chain variable region and/or (e.g., and) a humanized light chain variable region.

[0481] Humanized antibodies are human immunoglobulins (recipient antibody) in which residues from a complementary determining region (CDR) of the recipient are replaced by residues from a CDR of a non-human species (donor antibody) such as mouse, rat, or rabbit having the desired specificity, affinity, and capacity. In some embodiments, Fv framework region (FR) residues of the human immunoglobulin are replaced by corresponding non-human residues. Furthermore, the humanized antibody may comprise residues that are found neither in the recipient antibody nor in the imported CDR or framework sequences, but are included to further refine and optimize antibody performance. In general, the humanized antibody will comprise substantially all of at least one, and typically two, variable domains, in which all or substantially all of the CDR regions correspond to those of a non-human immunoglobulin and all or substantially all of the FR regions are those of a human immunoglobulin consensus sequence. The humanized antibody optimally also will comprise at least a portion of an immunoglobulin constant region or domain (Fc), typically that of a human immunoglobulin. Antibodies may have Fc regions modified as described in WO 99/58572. Other forms of humanized antibodies have one or more CDRs (one, two, three, four, five, six) which are altered with respect to the original antibody, which are also termed one or more CDRs derived from one or more CDRs from the original antibody. Humanized antibodies may also involve affinity maturation.

[0482] In some embodiments, humanization is achieved by grafting the CDRs (e.g., as shown in Table 9) into the IGKV1-NL1*01 and IGHV1-3*01 human variable domains. In some embodiments, the transferrin receptor antibody of the present disclosure is a humanized variant comprising one or more amino acid substitutions at positions 9, 13, 17, 18, 40, 45, and 70 as compared with the VL as set forth in SEQ ID NO: 231, and/or (e.g., and) one or more amino acid substitutions at positions 1, 5, 7, 11, 12, 20, 38, 40, 44, 66, 75, 81, 83, 87, and 108 as compared with the VH as set forth in SEQ ID NO: 230. In some embodiments, the transferrin receptor antibody of the present disclosure is a humanized variant comprising amino acid substitutions at all of positions 9, 13, 17, 18, 40, 45, and 70 as compared with the VL as set forth in SEQ ID NO: 231, and/or (e.g., and) amino acid substitutions at all of positions 1, 5, 7, 11, 12, 20, 38, 40, 44, 66, 75, 81, 83, 87, and 108 as compared with the VH as set forth in SEQ ID NO: 230.

[0483] In some embodiments, the transferrin receptor antibody of the present disclosure is a humanized antibody and contains the residues at positions 43 and 48 of the VL as set forth in SEQ ID NO: 231. Alternatively or in addition (e.g., in addition), the transferrin receptor antibody of the present disclosure is a humanized antibody and contains the residues at positions 48, 67, 69, 71, and 73 of the VH as set forth in SEQ ID NO: 230.

[0484] The VH and VL amino acid sequences of an example humanized antibody that may be used in accordance with the present disclosure are provided:

[0485] Humanized VH

EVQLVQSGAEVKKPGASVKVSCKASGYTFTSYWMHWVRQAPGQRLEWIGE
INPTNGRTNYIEKFKSRATLTVDKSASTAYMELSSLRSEDTAVYYCARGT
RAYHYWGQGTMVTVSS (SEQ ID NO: 234)

[0486] Humanized VL

DIQMTQSPSSLSASVGDRVTITCRASDNLYSNLAWYQQKPGKSPKLLVYD
ATNLADGVPSRFSGSGSGTDYTLTISSLQPEDFATYYCQHFWGTPLTFGQ
GTKVEIK (SEQ ID NO: 235)

[0487] In some embodiments, the transferrin receptor antibody of the present disclosure comprises a VH comprising the amino acid sequence of SEQ ID NO: 234. Alternatively or in addition (e.g., in addition), the transferrin receptor antibody of the present disclosure comprises a VL comprising the amino acid sequence of SEQ ID NO: 235.

[0488] In some embodiments, the transferrin receptor antibody of the present disclosure comprises a VH containing no more than 25 amino acid variations (e.g., no more than 25, 24, 23, 22, 21, 20, 19, 18, 17, 16, 15, 14, 13, 12, 11, 10, 9, 8, 7, 6, 5, 4, 3, 2, or 1 amino acid variation) as compared with the VH as set forth in SEQ ID NO: 234. Alternatively or in addition (e.g., in addition), the transferrin receptor antibody of the present disclosure comprises a VL containing no more than 15 amino acid variations (e.g., no more than 20, 19, 18, 17, 16, 15, 14, 13, 12, 11, 9, 8, 7, 6, 5, 4, 3, 2, or 1 amino acid variation) as compared with the VL as set forth in SEQ ID NO: 235.

[0489] In some embodiments, the transferrin receptor antibody of the present disclosure comprises a VH comprising an amino acid sequence that is at least 80% (e.g., 80%, 85%, 90%, 95%, or 98%) identical to the VH as set forth in SEQ ID NO: 234. Alternatively or in addition (e.g., in addition), the transferrin receptor antibody of the present disclosure comprises a VL comprising an amino acid sequence that is at least 80% (e.g., 80%, 85%, 90%, 95%, or 98%) identical to the VL as set forth in SEQ ID NO: 235.

[0490] In some embodiments, the transferrin receptor antibody of the present disclosure is a humanized variant comprising amino acid substitutions at one or more of positions 43 and 48 as compared with the VL as set forth in SEQ ID NO: 231, and/or (e.g., and) amino acid substitutions at one or more of positions 48, 67, 69, 71, and 73 as compared with the VH as set forth in SEQ ID NO: 230. In some embodiments, the transferrin receptor antibody of the present disclosure is a humanized variant comprising a S43A and/or (e.g., and) a V48L mutation as compared with the VL as set forth in SEQ ID NO: 231, and/or (e.g., and) one or more of A67V, L69I, V71R, and K73T mutations as compared with the VH as set forth in SEQ ID NO: 230

[0491] In some embodiments, the transferrin receptor antibody of the present disclosure is a humanized variant comprising amino acid substitutions at one or more of positions 9, 13, 17, 18, 40, 43, 48, 45, and 70 as compared with the VL as set forth in SEQ ID NO: 231, and/or (e.g., and) amino acid substitutions at one or more of positions 1, 5, 7, 11, 12, 20, 38, 40, 44, 48, 66, 67, 69, 71, 73, 75, 81, 83, 87, and 108 as compared with the VH as set forth in SEQ ID NO: 230.

[0492] In some embodiments, the transferrin receptor antibody of the present disclosure is a chimeric antibody, which can include a heavy constant region and a light constant region from a human antibody. Chimeric antibodies refer to antibodies having a variable region or part of variable region from a first species and a constant region from a second species. Typically, in these chimeric antibodies, the variable region of both light and heavy chains mimics the variable regions of antibodies derived from one species of mammals (e.g., a non-human mammal such as mouse, rabbit, and rat), while the constant portions are homologous to the sequences in antibodies derived from another mammal such as human. In some embodiments, amino acid modifications can be made in the variable region and/or (e.g., and) the constant region.

[0493] In some embodiments, the transferrin receptor antibody described herein is a chimeric antibody, which can include a heavy constant region and a light constant region from a human antibody. Chimeric antibodies refer to antibodies having a variable region or part of variable region from a first species and a constant region from a second species. Typically, in these chimeric antibodies, the variable region of both light and heavy chains mimics the variable regions of antibodies derived from one species of mammals (e.g., a non-human mammal such as mouse, rabbit, and rat), while the constant portions are homologous to the sequences in antibodies derived from another mammal such as human. In some embodiments, amino acid modifications can be made in the variable region and/or (e.g., and) the constant region.

[0494] In some embodiments, the heavy chain of any of the transferrin receptor antibodies as described herein may comprises a heavy chain constant region (CH) or a portion thereof (e.g., CH1, CH2, CH3, or a combination thereof). The heavy chain constant region can of any suitable origin, e.g., human, mouse, rat, or rabbit. In one specific example, the heavy chain constant region is from a human IgG (a gamma heavy chain), e.g., IgG1, IgG2, or IgG4. An example of a human IgG1 constant region is given below:

ASTKGPSVFPLAPSSKSTSGGTAALGCLVKDYFPEPVTVSWNSGALTSGV
HTFPAVLQSSGLYSLSSVVTVPSSSLGTQTYICNVNHKPSNTKVDKKVEP
KSCDKTHTCPPCPAPELLGGPSVFLFPPKPKDTLMISRTPEVTCVVVDVS
HEDPEVKFNWYVDGVEVHNAKTKPREEQYNSTYRVVSVLTVLHQDWLNGK
EYKCKVSNKALPAPIEKTISKAKGQPREPQVYTLPPSRDELTKNQVSLTC
LVKGFYPSDIAVEWESNGQPENNYKTTPPVLDSDGSFFLYSKLTVDKSRW
QQGNVFSCSVMHEALHNHYTQKSLSLSPGK (SEQ ID NO: 175)

[0495] In some embodiments, the light chain of any of the transferrin receptor antibodies described herein may further comprise a light chain constant region (CL), which can be any CL known in the art. In some examples, the CL is a kappa light chain. In other examples, the CL is a lambda light chain. In some embodiments, the CL is a kappa light chain, the sequence of which is provided below:

RTVAAPSVFIFPPSDEQLKSGTASVVCLLNNFYPREAKVQWKVDNALQSG
NSQESVTEQDSKDSTYSLSSTLTLSKADYEKHKVYACEVTHQGLSSPVTK
SFNRGEC (SEQ ID NO:177)

[0496] Other antibody heavy and light chain constant regions are well known in the art, e.g., those provided in the IMGT database (www.imgt.org) or at www.vbase2.org/vbstat.php., both of which are incorporated by reference herein.

[0497] Examples of heavy chain and light chain amino acid sequences of the transferrin receptor antibodies described are provided below:

[0498] Heavy Chain (VH + human IgG1 constant region)

QVQLQQPGAELVKPGASVKLSCKASGYTFTSYWMHWVKQRPGQGLEWIGE
INPTNGRTNYIEKFKSKATLTVDKSSSTAYMQLSSLTSEDSAVYYCARGT
RAYHYWGQGTSVTVSSASTKGPSVFPLAPSSKSTSGGTAALGCLVKDYFP
EPVTVSWNSGALTSGVHTFPAVLQSSGLYSLSSVVTVPSSSLGTQTYICN
VNHKPSNTKVDKKVEPKSCDKTHTCPPCPAPELLGGPSVFLFPPKPKDTL
MISRTPEVTCVVVDVSHEDPEVKFNWYVDGVEVHNAKTKPREEQYNSTYR
VVSVLTVLHQDWLNGKEYKCKVSNKALPAPIEKTISKAKGQPREPQVYTL
PPSRDELTKNQVSLTCLVKGFYPSDIAVEWESNGQPENNYKTTPPVLDSD
GSFFLYSKLTVDKSRWQQGNVFSCSVMHEALHNHYTQKSLSLSPGK (SE
Q ID NO: 236)

[0499] Light Chain (VL + kappa light chain)

DIQMTQSPASLSVSVGETVTITCRASDNLYSNLAWYQQKQGKSPQLLVYD
ATNLADGVPSRFSGSGSGTQYSLKINSLQSEDFGTYYCQHFWGTPLTFGA
GTKLELKRTVAAPSVFIFPPSDEQLKSGTASVVCLLNNFYPREAKVQWKV
DNALQSGNSQESVTEQDSKDSTYSLSSTLTLSKADYEKHKVYACEVTHQG
LSSPVTKSFNRGEC (SEQ ID NO: 237)

[0500] Heavy Chain (humanized VH + human IgG1 constant region)

EVQLVQSGAEVKKPGASVKVSCKASGYTFTSYWMHWVRQAPGQRLEWIGE
INPTNGRTNYIEKFKSRATLTVDKSASTAYMELSSLRSEDTAVYYCARGT
RAYHYWGQGTMVTVSSASTKGPSVFPLAPSSKSTSGGTAALGCLVKDYFP
EPVTVSWNSGALTSGVHTFPAVLQSSGLYSLSSVVTVPSSSLGTQTYICN
VNHKPSNTKVDKKVEPKSCDKTHTCPPCPAPELLGGPSVFLFPPKPKDTL
MISRTPEVTCVVVDVSHEDPEVKFNWYVDGVEVHNAKTKPREEQYNSTYR
VVSVLTVLHQDWLNGKEYKCKVSNKALPAPIEKTISKAKGQPREPQVYTL
PPSRDELTKNQVSLTCLVKGFYPSDIAVEWESNGQPENNYKTTPPVLDSD
GSFFLYSKLTVDKSRWQQGNVFSCSVMHEALHNHYTQKSLSLSPGK (SE
Q ID NO: 238)

[0501] Light Chain (humanized VL + kappa light chain)

DIQMTQSPSSLSASVGDRVTITCRASDNLYSNLAWYQQKPGKSPKLLVYD
ATNLADGVPSRFSGSGSGTDYTLTISSLQPEDFATYYCQHFWGTPLTFGQ
GTKVEIKRTVAAPSVFIFPPSDEQLKSGTASVVCLLNNFYPREAKVQWKV
DNALQSGNSQESVTEQDSKDSTYSLSSTLTLSKADYEKHKVYACEVTHQG
LSSPVTKSFNRGEC (SEQ ID NO: 239)

[0502] In some embodiments, the transferrin receptor antibody described herein comprises a heavy chain comprising an amino acid sequence that is at least 80% (e.g., 80%, 85%, 90%, 95%, or 98%) identical to SEQ ID NO: 236. Alternatively or in addition (e.g., in addition), the transferrin receptor antibody described herein comprises a light chain comprising an amino acid sequence that is at least 80% (e.g., 80%, 85%, 90%, 95%, or 98%) identical to SEQ ID NO: 237. In some embodiments, the transferrin receptor antibody described herein comprises a heavy chain comprising the amino acid sequence of SEQ ID NO: 236. Alternatively or in addition (e.g., in addition), the transferrin receptor antibody described herein comprises a light chain comprising the amino acid sequence of SEQ ID NO: 237.

[0503] In some embodiments, the transferrin receptor antibody of the present disclosure comprises a heavy chain containing no more than 25 amino acid variations (e.g., no more than 25, 24, 23, 22, 21, 20, 19, 18, 17, 16, 15, 14, 13, 12, 11, 10, 9, 8, 7, 6, 5, 4, 3, 2, or 1 amino acid variation) as compared with the heavy chain as set forth in SEQ ID NO: 236. Alternatively or in addition (e.g., in addition), the transferrin receptor antibody of the present disclosure comprises a light chain containing no more than 15 amino acid variations (e.g., no more than 20, 19, 18, 17, 16, 15, 14, 13, 12, 11, 9, 8, 7, 6, 5, 4, 3, 2, or 1 amino acid variation) as compared with the light chain as set forth in SEQ ID NO: 237.

[0504] In some embodiments, the transferrin receptor antibody described herein comprises a heavy chain comprising an amino acid sequence that is at least 80% (e.g., 80%, 85%, 90%, 95%, or 98%) identical to SEQ ID NO: 238. Alternatively or in addition (e.g., in addition), the transferrin receptor antibody described herein comprises a light chain comprising an amino acid sequence that is at least 80% (e.g., 80%, 85%, 90%, 95%, or 98%) identical to SEQ ID NO: 239. In some embodiments, the transferrin receptor antibody described herein comprises a heavy chain comprising the amino acid sequence of SEQ ID NO: 238. Alternatively or in addition (e.g., in addition), the transferrin receptor antibody described herein comprises a light chain comprising the amino acid sequence of SEQ ID NO: 239.

[0505] In some embodiments, the transferrin receptor antibody of the present disclosure comprises a heavy chain containing no more than 25 amino acid variations (e.g., no more than 25, 24, 23, 22, 21, 20, 19, 18, 17, 16, 15, 14, 13, 12, 11, 10, 9, 8, 7, 6, 5, 4, 3, 2, or 1 amino acid variation) as compared with the heavy chain of humanized antibody as set forth in SEQ ID NO: 238. Alternatively or in addition (e.g., in addition), the transferrin receptor antibody of the present disclosure comprises a light chain containing no more than 15 amino acid variations (e.g., no more than 20, 19, 18, 17, 16, 15, 14, 13, 12, 11, 9, 8, 7, 6, 5, 4, 3, 2, or 1 amino acid variation) as compared with the light chain of humanized antibody as set forth in SEQ ID NO: 239.

[0506] In some embodiments, the transferrin receptor antibody is an antigen binding fragment (FAB) of an intact antibody (full-length antibody). Antigen binding fragment of an intact antibody (full-length antibody) can be prepared via routine methods. For example, F(ab′)2 fragments can be produced by pepsin digestion of an antibody molecule, and Fab fragments that can be generated by reducing the disulfide bridges of F(ab′)2 fragments. Examples of FABs amino acid sequences of the transferrin receptor antibodies described herein are provided below:

[0507] Heavy Chain FAB (VH + a portion of human IgG1 constant region)

QVQLQQPGAELVKPGASVKLSCKASGYTFTSYWMHWVKQRPGQGLEWIGE
INPTNGRTNYIEKFKSKATLTVDKSSSTAYMQLSSLTSEDSAVYYCARGT
RAYHYWGQGTSVTVSSASTKGPSVFPLAPSSKSTSGGTAALGCLVKDYFP
EPVTVSWNSGALTSGVHTFPAVLQSSGLYSLSSVVTVPSSSLGTQTYICN
VNHKPSNTKVDKKVEPKSCDKTHTCP(SEQ ID NO: 240)

[0508] Heavy Chain FAB (humanized VH + a portion of human IgG1 constant region)

EVQLVQSGAEVKKPGASVKVSCKASGYTFTSYWMHWVRQAPGQRLEWIGE
INPTNGRTNYIEKFKSRATLTVDKSASTAYMELSSLRSEDTAVYYCARGT
RAYHYWGQGTMVTVSSASTKGPSVFPLAPSSKSTSGGTAALGCLVKDYFP
EPVTVSWNSGALTSGVHTFPAVLQSSGLYSLSSVVTVPSSSLGTQTYICN
VNHKPSNTKVDKKVEPKSCDKTHTCP (SEQ ID NO: 241)

[0509] In some embodiments, the transferrin receptor antibody described herein comprises a heavy chain comprising the amino acid sequence of SEQ ID NO: 240. Alternatively or in addition (e.g., in addition), the transferrin receptor antibody described herein comprises a light chain comprising the amino acid sequence of SEQ ID NO: 237.

[0510] In some embodiments, the transferrin receptor antibody described herein comprises a heavy chain comprising the amino acid sequence of SEQ ID NO: 241. Alternatively or in addition (e.g., in addition), the transferrin receptor antibody described herein comprises a light chain comprising the amino acid sequence of SEQ ID NO: 239.

[0511] The transferrin receptor antibodies described herein can be in any antibody form, including, but not limited to, intact (i.e., full-length) antibodies, antigen-binding fragments thereof (such as Fab, Fab′, F(ab′)2, Fv), single chain antibodies, bi-specific antibodies, or nanobodies. In some embodiments, the transferrin receptor antibody described herein is a scFv. In some embodiments, the transferrin receptor antibody described herein is a scFv-Fab (e.g., scFv fused to a portion of a constant region). In some embodiments, the transferrin receptor antibody described herein is a scFv fused to a constant region (e.g., human IgG1 constant region as set forth in SEQ ID NO: 175).

### b. Other Muscle-Targeting Antibodies

[0512] In some embodiments, the muscle-targeting antibody is an antibody that specifically binds hemojuvelin, caveolin-3, Duchenne muscular dystrophy peptide, myosin Iib or CD63. In some embodiments, the muscle-targeting antibody is an antibody that specifically binds a myogenic precursor protein. Exemplary myogenic precursor proteins include, without limitation, ABCG2, M-Cadherin/Cadherin-15, Caveolin-1, CD34, FoxK1, Integrin alpha 7, Integrin alpha 7 beta 1, MYF-5, MyoD, Myogenin, NCAM-⅟CD56, Pax3, Pax7, and Pax9. In some embodiments, the muscle-targeting antibody is an antibody that specifically binds a skeletal muscle protein. Exemplary skeletal muscle proteins include, without limitation, alpha-Sarcoglycan, beta-Sarcoglycan, Calpain Inhibitors, Creatine Kinase MM/CKMM, eIF5A, Enolase 2/Neuron-specific Enolase, epsilon-Sarcoglycan, FABP3/H-FABP, GDF-8/Myostatin, GDF-ll/GDF-8, Integrin alpha 7, Integrin alpha 7 beta 1, Integrin beta ⅟CD29, MCAM/CD146, MyoD, Myogenin, Myosin Light Chain Kinase Inhibitors, NCAM-⅟CD56, and Troponin I. In some embodiments, the muscle-targeting antibody is an antibody that specifically binds a smooth muscle protein. Exemplary smooth muscle proteins include, without limitation, alpha-Smooth Muscle Actin, VE-Cadherin, Caldesmon/CALD1, Calponin 1, Desmin, Histamine H2 R, Motilin R/GPR38, Transgelin/TAGLN, and Vimentin. However, it should be appreciated that antibodies to additional targets are within the scope of this disclosure and the exemplary lists of targets provided herein are not meant to be limiting.

### c. Antibody Features/Alterations

[0513] In some embodiments, conservative mutations can be introduced into antibody sequences (e.g., CDRs or framework sequences) at positions where the residues are not likely to be involved in interacting with a target antigen (e.g., transferrin receptor), for example, as determined based on a crystal structure. In some embodiments, one, two or more mutations (e.g., amino acid substitutions) are introduced into the Fc region of a muscle-targeting antibody described herein (e.g., in a CH2 domain (residues 231-340 of human IgG1) and/or (e.g., and) CH3 domain (residues 341-447 of human IgG1) and/or (e.g., and) the hinge region, with numbering according to the Kabat numbering system (e.g., the EU index in Kabat)) to alter one or more functional properties of the antibody, such as serum half-life, complement fixation, Fc receptor binding and/or (e.g., and) antigen-dependent cellular cytotoxicity.

[0514] In some embodiments, one, two or more mutations (e.g., amino acid substitutions) are introduced into the hinge region of the Fc region (CH1 domain) such that the number of cysteine residues in the hinge region are altered (e.g., increased or decreased) as described in, e.g., U.S. Pat. No. 5,677,425. The number of cysteine residues in the hinge region of the CH1 domain can be altered to, e.g., facilitate assembly of the light and heavy chains, or to alter (e.g., increase or decrease) the stability of the antibody or to facilitate linker conjugation.

[0515] In some embodiments, one, two or more mutations (e.g., amino acid substitutions) are introduced into the Fc region of a muscle-targeting antibody described herein (e.g., in a CH2 domain (residues 231-340 of human IgG1) and/or (e.g., and) CH3 domain (residues 341-447 of human IgG1) and/or (e.g., and) the hinge region, with numbering according to the Kabat numbering system (e.g., the EU index in Kabat)) to increase or decrease the affinity of the antibody for an Fc receptor (e.g., an activated Fc receptor) on the surface of an effector cell. Mutations in the Fc region of an antibody that decrease or increase the affinity of an antibody for an Fc receptor and techniques for introducing such mutations into the Fc receptor or fragment thereof are known to one of skill in the art. Examples of mutations in the Fc receptor of an antibody that can be made to alter the affinity of the antibody for an Fc receptor are described in, e.g., Smith P et al., (2012) PNAS 109: 6181-6186, U.S. Pat. No. 6,737,056, and International Publication Nos. WO 02/060919; WO 98/23289; and WO 97/34631, which are incorporated herein by reference.

[0516] In some embodiments, one, two or more amino acid mutations (i.e., substitutions, insertions or deletions) are introduced into an IgG constant domain, or FcRn-binding fragment thereof (preferably an Fc or hinge-Fc domain fragment) to alter (e.g., decrease or increase) half-life of the antibody in vivo. See, e.g., International Publication Nos. WO 02/060919; WO 98/23289; and WO 97/34631; and U.S. Pat. Nos. 5,869,046, 6,121,022, 6,277,375 and 6,165,745 for examples of mutations that will alter (e.g., decrease or increase) the half-life of an antibody in vivo.

[0517] In some embodiments, one, two or more amino acid mutations (i.e., substitutions, insertions or deletions) are introduced into an IgG constant domain, or FcRn-binding fragment thereof (preferably an Fc or hinge-Fc domain fragment) to decrease the half-life of the anti-transferrin receptor antibody in vivo. In some embodiments, one, two or more amino acid mutations (i.e., substitutions, insertions or deletions) are introduced into an IgG constant domain, or FcRn-binding fragment thereof (preferably an Fc or hinge-Fc domain fragment) to increase the half-life of the antibody in vivo. In some embodiments, the antibodies can have one or more amino acid mutations (e.g., substitutions) in the second constant (CH2) domain (residues 231-340 of human IgG1) and/or (e.g., and) the third constant (CH3) domain (residues 341-447 of human IgG1), with numbering according to the EU index in Kabat (Kabat E A et al., (1991) supra). In some embodiments, the constant region of the IgG1 of an antibody described herein comprises a methionine (M) to tyrosine (Y) substitution in position 252, a serine (S) to threonine (T) substitution in position 254, and a threonine (T) to glutamic acid (E) substitution in position 256, numbered according to the EU index as in Kabat. See U.S. Pat. No.7,658,921, which is incorporated herein by reference. This type of mutant IgG, referred to as “YTE mutant” has been shown to display fourfold increased half-life as compared to wild-type versions of the same antibody (see Dall’Acqua W F et al., (2006) J Biol Chem 281: 23514-24). In some embodiments, an antibody comprises an IgG constant domain comprising one, two, three or more amino acid substitutions of amino acid residues at positions 251-257, 285-290, 308-314, 385-389, and 428-436, numbered according to the EU index as in Kabat.

[0518] In some embodiments, one, two or more amino acid substitutions are introduced into an IgG constant domain Fc region to alter the effector function(s) of the anti-transferrin receptor antibody. The effector ligand to which affinity is altered can be, for example, an Fc receptor or the C1 component of complement. This approach is described in further detail in U.S. Pat. Nos. 5,624,821 and 5,648,260. In some embodiments, the deletion or inactivation (through point mutations or other means) of a constant region domain can reduce Fc receptor binding of the circulating antibody thereby increasing tumor localization. See, e.g., U.S. Pat. Nos. 5,585,097 and 8,591,886 for a description of mutations that delete or inactivate the constant domain and thereby increase tumor localization. In some embodiments, one or more amino acid substitutions may be introduced into the Fc region of an antibody described herein to remove potential glycosylation sites on Fc region, which may reduce Fc receptor binding (see, e.g., Shields R L et al., (2001) J Biol Chem 276: 6591-604).

[0519] In some embodiments, one or more amino in the constant region of a muscle-targeting antibody described herein can be replaced with a different amino acid residue such that the antibody has altered Clq binding and/or (e.g., and) reduced or abolished complement dependent cytotoxicity (CDC). This approach is described in further detail in U.S. Pat. No. 6,194,551 (Idusogie et al). In some embodiments, one or more amino acid residues in the N-terminal region of the CH2 domain of an antibody described herein are altered to thereby alter the ability of the antibody to fix complement. This approach is described further in International Publication No. WO 94/29351. In some embodiments, the Fc region of an antibody described herein is modified to increase the ability of the antibody to mediate antibody dependent cellular cytotoxicity (ADCC) and/or (e.g., and) to increase the affinity of the antibody for an Fcγ receptor. This approach is described further in International Publication No. WO 00/42072.

[0520] In some embodiments, the heavy and/or (e.g., and) light chain variable domain(s) sequence(s) of the antibodies provided herein can be used to generate, for example, CDR-grafted, chimeric, humanized, or composite human antibodies or antigen-binding fragments, as described elsewhere herein. As understood by one of ordinary skill in the art, any variant, CDR-grafted, chimeric, humanized, or composite antibodies derived from any of the antibodies provided herein may be useful in the compositions and methods described herein and will maintain the ability to specifically bind transferrin receptor, such that the variant, CDR-grafted, chimeric, humanized, or composite antibody has at least 50%, at least 60%, at least 70%, at least 80%, at least 90%, at least 95% or more binding to transferrin receptor relative to the original antibody from which it is derived.

[0521] In some embodiments, the antibodies provided herein comprise mutations that confer desirable properties to the antibodies. For example, to avoid potential complications due to Fab-arm exchange, which is known to occur with native IgG4 mAbs, the antibodies provided herein may comprise a stabilizing ‘Adair’ mutation (Angal S., et al., “A single amino acid substitution abolishes the heterogeneity of chimeric mouse/human (IgG4) antibody,” Mol Immunol 30, 105-108; 1993), where serine 228 (EU numbering; residue 241 Kabat numbering) is converted to proline resulting in an IgG1-like hinge sequence. Accordingly, any of the antibodies may include a stabilizing ‘Adair’ mutation.

[0522] As provided herein, antibodies of this disclosure may optionally comprise constant regions or parts thereof. For example, a VL domain may be attached at its C-terminal end to a light chain constant domain like Cκ or Cλ. Similarly, a VH domain or portion thereof may be attached to all or part of a heavy chain like IgA, IgD, IgE, IgG, and IgM, and any isotype subclass. Antibodies may include suitable constant regions (see, for example, Kabat et al., Sequences of Proteins of Immunological Interest, No. 91-3242, National Institutes of Health Publications, Bethesda, Md. (1991)). Therefore, antibodies within the scope of this may disclosure include VH and VL domains, or an antigen binding portion thereof, combined with any suitable constant regions.

[0523] In some embodiments, the anti-TfR antibody of the present disclosure is a humanized antibody comprising human framework regions with the CDRs of a murine antibody listed in Table 2 or Table 4 (e.g., 3A4, 3M12, or 5H12). In some embodiments, the anti-TfR antibody of the present disclosure is an IgG1 kappa that comprises human framework regions with the CDRs of a murine antibody listed in Table 2 or Table 4 (e.g., 3A4, 3M12, or 5H12). In some embodiments, the anti-TfR antibody of the present disclosure is a Fab′ fragment of an IgG1 kappa that comprises human framework regions with the CDRs of a murine antibody listed in Table 1 or Table 3 (e.g., 3A4, 3M12, or 5H12). In some embodiments, the anti-TfR antibody of the present disclose comprises the CDRs of the antibody provided in Table 7. In some embodiments, the anti-TfR antibody of the present disclosure is an IgG1 kappa that comprises the variable regions of the antibody provided in Table 7. In some embodiments, the anti-TfR antibody of the present disclosure is a Fab′ fragment of an IgG1 kappa that comprises the variable regions of the antibody provided in Table 7.

[0524] In some embodiments, any one of the anti-TfR antibodies described herein is produced by recombinant DNA technology in Chinese hamster ovary (CHO) cell suspension culture, optionally in CHO-K1 cell (e.g., CHO-K1 cells derived from European Collection of Animal Cell Culture, Cat. No. 85051005) suspension culture.

[0525] In some embodiments, an antibody provided herein may have one or more post-translational modifications. In some embodiments, N-terminal cyclization, also called pyroglutamate formation (pyro-Glu), may occur in the antibody at N-terminal Glutamate (Glu) and/or Glutamine (Gln) residues during production. In some embodiments, pyroglutamate formation occurs in a heavy chain sequence. In some embodiments, pyroglutamate formation occurs in a light chain sequence.

### ii. Muscle-Targeting Peptides

[0526] Some aspects of the disclosure provide muscle-targeting peptides as muscle-targeting agents. Short peptide sequences (e.g., peptide sequences of 5-20 amino acids in length) that bind to specific cell types have been described. For example, cell-targeting peptides have been described in Vines e., et al., A. “Cell-penetrating and cell-targeting peptides in drug delivery” Biochim Biophys Acta 2008, 1786: 126-38; Jarver P., et al., “In vivo biodistribution and efficacy of peptide mediated delivery” Trends Pharmacol Sci 2010; 31: 528-35; Samoylova T.I., et al., “Elucidation of muscle-binding peptides by phage display screening” Muscle Nerve 1999; 22: 460-6; U.S. Pat. No. 6,329,501, issued on Dec. 11, 2001, entitled “METHODS AND COMPOSITIONS FOR TARGETING COMPOUNDS TO MUSCLE”; and Samoylov A.M., et al., “Recognition of cell-specific binding of phage display derived peptides using an acoustic wave sensor.” Biomol Eng 2002; 18: 269-72; the entire contents of each of which are incorporated herein by reference. By designing peptides to interact with specific cell surface antigens (e.g., receptors), selectivity for a desired tissue, e.g., muscle, can be achieved. Skeletal muscle-targeting has been investigated and a range of molecular payloads are able to be delivered. These approaches may have high selectivity for muscle tissue without many of the practical disadvantages of a large antibody or viral particle. Accordingly, in some embodiments, the muscle-targeting agent is a muscle-targeting peptide that is from 4 to 50 amino acids in length. In some embodiments, the muscle-targeting peptide is 4, 5, 6, 7, 8, 9, 10, 11, 12, 13, 14, 15, 16, 17, 18, 19, 20, 21, 22, 23, 24, 25, 26, 27, 28, 29, 30, 31, 32, 33, 34, 35, 36, 37, 38, 39, 40, 41, 42, 43, 44, 45, 46, 47, 48, 49, or 50 amino acids in length. Muscle-targeting peptides can be generated using any of several methods, such as phage display.

[0527] In some embodiments, a muscle-targeting peptide may bind to an internalizing cell surface receptor that is overexpressed or relatively highly expressed in muscle cells, e.g. a transferrin receptor, compared with certain other cells. In some embodiments, a muscle-targeting peptide may target, e.g., bind to, a transferrin receptor. In some embodiments, a peptide that targets a transferrin receptor may comprise a segment of a naturally occurring ligand, e.g., transferrin. In some embodiments, a peptide that targets a transferrin receptor is as described in U.S. Pat. No. 6,743,893, filed Nov. 30, 2000, “RECEPTOR-MEDIATED UPTAKE OF PEPTIDES THAT BIND THE HUMAN TRANSFERRIN RECEPTOR”. In some embodiments, a peptide that targets a transferrin receptor is as described in Kawamoto, M. et al, “A novel transferrin receptor-targeted hybrid peptide disintegrates cancer cell membrane to induce rapid killing of cancer cells.” BMC Cancer. 2011 Aug 18;11:359. In some embodiments, a peptide that targets a transferrin receptor is as described in US Pat. No. 8,399,653, filed May 20, 2011, “TRANSFERRIN/TRANSFERRIN RECEPTOR-MEDIATED SIRNA DELIVERY”.

[0528] As discussed above, examples of muscle targeting peptides have been reported. For example, muscle-specific peptides were identified using phage display library presenting surface heptapeptides. As one example a peptide having the amino acid sequence ASSLNIA (SEQ ID NO: 248) bound to C2C12 murine myotubes in vitro, and bound to mouse muscle tissue in vivo. Accordingly, in some embodiments, the muscle-targeting agent comprises the amino acid sequence ASSLNIA (SEQ ID NO: 248). This peptide displayed improved specificity for binding to heart and skeletal muscle tissue after intravenous injection in mice with reduced binding to liver, kidney, and brain. Additional muscle-specific peptides have been identified using phage display. For example, a 12 amino acid peptide was identified by phage display library for muscle targeting in the context of treatment for DMD. See, Yoshida D., et al., “Targeting of salicylate to skin and muscle following topical injections in rats.” Int J Pharm 2002; 231: 177-84; the entire contents of which are hereby incorporated by reference. Here, a 12 amino acid peptide having the sequence SKTFNTHPQSTP (SEQ ID NO: 249) was identified and this muscle-targeting peptide showed improved binding to C2C12 cells relative to the ASSLNIA (SEQ ID NO: 248) peptide.

[0529] An additional method for identifying peptides selective for muscle (e.g., skeletal muscle) over other cell types includes in vitro selection, which has been described in Ghosh D., et al., “Selection of muscle-binding peptides from context-specific peptide-presenting phage libraries for adenoviral vector targeting” J Virol 2005; 79: 13667-72; the entire contents of which are incorporated herein by reference. By pre-incubating a random 12-mer peptide phage display library with a mixture of non-muscle cell types, non-specific cell binders were selected out. Following rounds of selection the 12 amino acid peptide TARGEHKEEELI (SEQ ID NO: 250) appeared most frequently. Accordingly, in some embodiments, the muscle-targeting agent comprises the amino acid sequence TARGEHKEEELI (SEQ ID NO: 250).

[0530] A muscle-targeting agent may an amino acid-containing molecule or peptide. A muscle-targeting peptide may correspond to a sequence of a protein that preferentially binds to a protein receptor found in muscle cells. In some embodiments, a muscle-targeting peptide contains a high propensity of hydrophobic amino acids, e.g. valine, such that the peptide preferentially targets muscle cells. In some embodiments, a muscle-targeting peptide has not been previously characterized or disclosed. These peptides may be conceived of, produced, synthesized, and/or (e.g., and) derivatized using any of several methodologies, e.g. phage displayed peptide libraries, one-bead one-compound peptide libraries, or positional scanning synthetic peptide combinatorial libraries. Exemplary methodologies have been characterized in the art and are incorporated by reference (Gray, B.P. and Brown, K.C. “Combinatorial Peptide Libraries: Mining for Cell-Binding Peptides” Chem Rev. 2014, 114:2, 1020-1081.; Samoylova, T.I. and Smith, B.F. “Elucidation of muscle-binding peptides by phage display screening.” Muscle Nerve, 1999, 22:4. 460-6.). In some embodiments, a muscle-targeting peptide has been previously disclosed (see, e.g. Writer M.J. et al. “Targeted gene delivery to human airway epithelial cells with synthetic vectors incorporating novel targeting peptides selected by phage display.” J. Drug Targeting. 2004;12:185; Cai, D. “BDNF-mediated enhancement of inflammation and injury in the aging heart.” Physiol Genomics. 2006, 24:3, 191-7.; Zhang, L. “Molecular profiling of heart endothelial cells.” Circulation, 2005, 112:11, 1601-11.; McGuire, M.J. et al. “In vitro selection of a peptide with high selectivity for cardiomyocytes in vivo.” J Mol Biol. 2004, 342:1, 171-82.). Exemplary muscle-targeting peptides comprise an amino acid sequence of the following group: CQAQGQLVC (SEQ ID NO: 251), CSERSMNFC (SEQ ID NO: 252), CPKTRRVPC (SEQ ID NO: 253), WLSEAGPVVTVRALRGTGSW (SEQ ID NO: 254), ASSLNIA (SEQ ID NO: 248), CMQHSMRVC (SEQ ID NO: 255), and DDTRHWG (SEQ ID NO: 256). In some embodiments, a muscle-targeting peptide may comprise about 2-25 amino acids, about 2-20 amino acids, about 2-15 amino acids, about 2-10 amino acids, or about 2-5 amino acids. Muscle-targeting peptides may comprise naturally-occurring amino acids, e.g. cysteine, alanine, or non-naturally-occurring or modified amino acids. Non-naturally occurring amino acids include β-amino acids, homo-amino acids, proline derivatives, 3-substituted alanine derivatives, linear core amino acids, N-methyl amino acids, and others known in the art. In some embodiments, a muscle-targeting peptide may be linear; in other embodiments, a muscle-targeting peptide may be cyclic, e.g. bicyclic (see, e.g. Silvana, M.G. et al. Mol. Therapy, 2018, 26:1, 132-147.).

### iii. Muscle-Targeting Receptor Ligands

[0531] A muscle-targeting agent may be a ligand, e.g. a ligand that binds to a receptor protein. A muscle-targeting ligand may be a protein, e.g. transferrin, which binds to an internalizing cell surface receptor expressed by a muscle cell. Accordingly, in some embodiments, the muscle-targeting agent is transferrin, or a derivative thereof that binds to a transferrin receptor. A muscle-targeting ligand may alternatively be a small molecule, e.g. a lipophilic small molecule that preferentially targets muscle cells relative to other cell types. Exemplary lipophilic small molecules that may target muscle cells include compounds comprising cholesterol, cholesteryl, stearic acid, palmitic acid, oleic acid, oleyl, linolene, linoleic acid, myristic acid, sterols, dihydrotestosterone, testosterone derivatives, glycerine, alkyl chains, trityl groups, and alkoxy acids.

### iv. Muscle-Targeting Aptamers

[0532] A muscle-targeting agent may be an aptamer, e.g. an RNA aptamer, which preferentially targets muscle cells relative to other cell types. In some embodiments, a muscle-targeting aptamer has not been previously characterized or disclosed. These aptamers may be conceived of, produced, synthesized, and/or (e.g., and) derivatized using any of several methodologies, e.g. Systematic Evolution of Ligands by Exponential Enrichment. Exemplary methodologies have been characterized in the art and are incorporated by reference (Yan, A.C. and Levy, M. “Aptamers and aptamer targeted delivery” RNA biology, 2009, 6:3, 316-20.; Germer, K. et al. “RNA aptamers and their therapeutic and diagnostic applications.” Int. J. Biochem. Mol. Biol. 2013; 4: 27-40.). In some embodiments, a muscle-targeting aptamer has been previously disclosed (see, e.g. Phillippou, S. et al. “Selection and Identification of Skeletal-Muscle-Targeted RNA Aptamers.” Mol Ther Nucleic Acids. 2018, 10:199-214.; Thiel, W.H. et al. “Smooth Muscle Cell-targeted RNA Aptamer Inhibits Neointimal Formation.” Mol Ther. 2016, 24:4, 779-87.). Exemplary muscle-targeting aptamers include the A01B RNA aptamer and RNA Apt 14. In some embodiments, an aptamer is a nucleic acid-based aptamer, an oligonucleotide aptamer or a peptide aptamer. In some embodiments, an aptamer may be about 5-15 kDa, about 5-10 kDa, about 10-15 kDa, about 1-5 Da, about 1-3 kDa, or smaller.

### v. Other Muscle-Targeting Agents

[0533] One strategy for targeting a muscle cell (e.g., a skeletal muscle cell) is to use a substrate of a muscle transporter protein, such as a transporter protein expressed on the sarcolemma. In some embodiments, the muscle-targeting agent is a substrate of an influx transporter that is specific to muscle tissue. In some embodiments, the influx transporter is specific to skeletal muscle tissue. Two main classes of transporters are expressed on the skeletal muscle sarcolemma, (1) the adenosine triphosphate (ATP) binding cassette (ABC) superfamily, which facilitate efflux from skeletal muscle tissue and (2) the solute carrier (SLC) superfamily, which can facilitate the influx of substrates into skeletal muscle. In some embodiments, the muscle-targeting agent is a substrate that binds to an ABC superfamily or an SLC superfamily of transporters. In some embodiments, the substrate that binds to the ABC or SLC superfamily of transporters is a naturally-occurring substrate. In some embodiments, the substrate that binds to the ABC or SLC superfamily of transporters is a non-naturally occurring substrate, for example, a synthetic derivative thereof that binds to the ABC or SLC superfamily of transporters.

[0534] In some embodiments, the muscle-targeting agent is a substrate of an SLC superfamily of transporters. SLC transporters are either equilibrative or use proton or sodium ion gradients created across the membrane to drive transport of substrates. Exemplary SLC transporters that have high skeletal muscle expression include, without limitation, the SATT transporter (ASCT1; SLC1A4), GLUT4 transporter (SLC2A4), GLUT7 transporter (GLUT7; SLC2A7), ATRC2 transporter (CAT-2; SLC7A2), LAT3 transporter (KIAA0245; SLC7A6), PHT1 transporter (PTR4; SLC15A4), OATP-J transporter (OATP5A1; SLC21A15), OCT3 transporter (EMT; SLC22A3), OCTN2 transporter (FLJ46769; SLC22A5), ENT transporters (ENT1; SLC29A1 and ENT2; SLC29A2), PAT2 transporter (SLC36A2), and SAT2 transporter (KIAA1382; SLC38A2). These transporters can facilitate the influx of substrates into skeletal muscle, providing opportunities for muscle targeting.

[0535] In some embodiments, the muscle-targeting agent is a substrate of an equilibrative nucleoside transporter 2 (ENT2) transporter. Relative to other transporters, ENT2 has one of the highest mRNA expressions in skeletal muscle. While human ENT2 (hENT2) is expressed in most body organs such as brain, heart, placenta, thymus, pancreas, prostate, and kidney, it is especially abundant in skeletal muscle. Human ENT2 facilitates the uptake of its substrates depending on their concentration gradient. ENT2 plays a role in maintaining nucleoside homeostasis by transporting a wide range of purine and pyrimidine nucleobases. The hENT2 transporter has a low affinity for all nucleosides (adenosine, guanosine, uridine, thymidine, and cytidine) except for inosine. Accordingly, in some embodiments, the muscle-targeting agent is an ENT2 substrate. Exemplary ENT2 substrates include, without limitation, inosine, 2′,3′-dideoxyinosine, and calofarabine. In some embodiments, any of the muscle-targeting agents provided herein are associated with a molecular payload (e.g., oligonucleotide payload). In some embodiments, the muscle-targeting agent is covalently linked to the molecular payload. In some embodiments, the muscle-targeting agent is non-covalently linked to the molecular payload.

[0536] In some embodiments, the muscle-targeting agent is a substrate of an organic cation/carnitine transporter (OCTN2), which is a sodium ion-dependent, high affinity carnitine transporter. In some embodiments, the muscle-targeting agent is carnitine, mildronate, acetylcarnitine, or any derivative thereof that binds to OCTN2. In some embodiments, the carnitine, mildronate, acetylcarnitine, or derivative thereof is covalently linked to the molecular payload (e.g., oligonucleotide payload).

[0537] A muscle-targeting agent may be a protein that is protein that exists in at least one soluble form that targets muscle cells. In some embodiments, a muscle-targeting protein may be hemojuvelin (also known as repulsive guidance molecule C or hemochromatosis type 2 protein), a protein involved in iron overload and homeostasis. In some embodiments, hemojuvelin may be full length or a fragment, or a mutant with at least 75%, at least 80%, at least 85%, at least 90%, at least 95%, at least 98% or at least 99% sequence identity to a functional hemojuvelin protein. In some embodiments, a hemojuvelin mutant may be a soluble fragment, may lack a N-terminal signaling, and/or (e.g., and) lack a C-terminal anchoring domain. In some embodiments, hemojuvelin may be annotated under GenBank RefSeq Accession Numbers NM_001316767.1, NM_145277.4, NM_202004.3, NM_213652.3, or NM_213653.3. It should be appreciated that a hemojuvelin may be of human, non-human primate, or rodent origin.

### B. Molecular Payloads

[0538] Some aspects of the disclosure provide molecular payloads, e.g., for modulating a biological outcome, e.g., the transcription of a DNA sequence, the expression of a protein, or the activity of a protein. In some embodiments, a molecular payload is linked to, or otherwise associated with a muscle-targeting agent. In some embodiments, such molecular payloads are capable of targeting to a muscle cell, e.g., via specifically binding to a nucleic acid or protein in the muscle cell following delivery to the muscle cell by an associated muscle-targeting agent. It should be appreciated that various types of muscle-targeting agents may be used in accordance with the disclosure. For example, the molecular payload may comprise, or consist of, an oligonucleotide (e.g., antisense oligonucleotide), a peptide (e.g., a peptide that binds a nucleic acid or protein associated with disease in a muscle cell), a protein (e.g., a protein that binds a nucleic acid or protein associated with disease in a muscle cell), or a small molecule (e.g., a small molecule that modulates the function of a nucleic acid or protein associated with disease in a muscle cell). In some embodiments, the molecular payload is an oligonucleotide that comprises a strand having a region of complementarity to a gene provided in Table 1. Exemplary molecular payloads are described in further detail herein, however, it should be appreciated that the exemplary molecular payloads provided herein are not meant to be limiting.

[0539] In some embodiments at least one (e.g., at least 2, at least 3, at least 4, at least 5, at least 10) molecular payload (e.g., oligonucleotides) is linked to a muscle-targeting agent. In some embodiments, all molecular payloads attached to a muscle-targeting agent are the same, e.g. target the same gene. In some embodiments, all molecular payloads attached to a muscle-targeting agent are different, for example the molecular payloads may target different portions of the same target gene, or the molecular payloads may target at least two different target genes. In some embodiments, a muscle-targeting agent may be attached to some molecular payloads that are the same and some molecular payloads that are different.

[0540] The present disclosure also provides a composition comprising a plurality of complexes, for which at least 80% (e.g., at least 85%, at least 90%, at least 91%, at least 92%, at least 93%, at least 94%, at least 95%, at least 96%, at least 97%, at least 98%, or at least 99%) of the complexes comprise a muscle-targeting agent linked to the same number of molecular payloads (e.g., oligonucleotides).

### i. Oligonucleotides

[0541] Any suitable oligonucleotide may be used as a molecular payload, as described herein. In some embodiments, the oligonucleotide may be designed to cause degradation of an mRNA (e.g., the oligonucleotide may be a gapmer, an siRNA, a ribozyme or an aptamer that causes degradation). In some embodiments, the oligonucleotide may be designed to block translation of an mRNA (e.g., the oligonucleotide may be a mixmer, an siRNA or an aptamer that blocks translation). In some embodiments, an oligonucleotide may be designed to caused degradation and block translation of an mRNA. In some embodiments, an oligonucleotide may be a guide nucleic acid (e.g., guide RNA) for directing activity of an enzyme (e.g., a gene editing enzyme). Other examples of oligonucleotides are provided herein. It should be appreciated that, in some embodiments, oligonucleotides in one format (e.g., antisense oligonucleotides) may be suitably adapted to another format (e.g., siRNA oligonucleotides) by incorporating functional sequences (e.g., antisense strand sequences) from one format to the other format.

[0542] In some embodiments, an oligonucleotide may comprise a region of complementarity to a target gene provided in Table 1. Further non-limiting examples are provided below for selected genes of Table 1.

### Dmpk/dm1

[0543] In some embodiments, examples of oligonucleotides useful for targeting DMPK, e.g., for the treatment of DM1, are provided in U.S. Pat. Application Publication 20100016215A1, published on Jan. 1, 2010, entitled Compound And Method For Treating Myotonic Dystrophy; U.S. Pat. Application Publication 20130237585A1, published Jul. 19, 2010, Modulation Of Dystrophia Myotonica-Protein Kinase (DMPK) Expression; U.S. Pat. Application Publication 20150064181A1, published on Mar. 5, 2015, entitled “Antisense Conjugates For Decreasing Expression Of Dmpk”; US Pat. Application Publication 20150238627A1, published on Aug. 27, 2015, entitled “Peptide-Linked Morpholino Antisense Oligonucleotides For Treatment Of Myotonic Dystrophy”; Pandey, S.K. et al. “Identification and Characterization of Modified Antisense Oligonucleotides Targeting DMPK in Mice and Nonhuman Primates for the Treatment of Myotonic Dystrophy Type 1 ” J. of Pharmacol Exp Ther, 2015, 355:329-340.; Langlois, M. et al. “Cytoplasmic and Nuclear Retained DMPK mRNAs Are Targets for RNA Interference in Myotonic Dystrophy Cells ” J. Biological Chemistry, 2005, 280:17, 16949-16954.; Jauvin, D. et al. “Targeting DMPK with Antisense Oligonucleotide Improves Muscle Strength in Myotonic Dystrophy Type 1 Mice”, Mol. Ther: Nucleic Acids, 2017, 7:465-474.; Mulders, S.A. et al. “Triplet-repeat oligonucleotide-mediated reversal of RNA toxicity in myotonic dystrophy” PNAS, 2009, 106:33, 13915-13920.; Wheeler, T.M. et al., “Targeting nuclear RNA for in vivo correction of myotonic dystrophy” Nature, 2012, 488(7409): 111-115.; and US Pat. Application Publication 20160304877A1, published on Oct. 20, 2016, entitled “Compounds And Methods For Modulation Of Dystrophia Myotonica-Protein Kinase (Dmpk) Expression,” the contents of each of which are incorporated herein by reference in their entireties.

[0544] Examples of oligonucleotides for promoting DMPK gene editing include US Pat. Application Publication 20170088819A1, published on Mar. 3, 2017, entitled “Genetic Correction Of Myotonic Dystrophy Type 1”; and International Patent Application Publication WO18002812A1, published on Apr. 1, 2018, entitled “Materials And Methods For Treatment Of Myotonic Dystrophy Type 1 (DM1) And Other Related Disorders,” the contents of each of which are incorporated herein by reference in their entireties.

[0545] In some embodiments, the oligonucleotide may have region of complementarity to a mutant form of DMPK, for example, a mutant form as reported in Botta A. et al. “The CTG repeat expansion size correlates with the splicing defects observed in muscles from myotonic dystrophy type 1 patients.” J Med Genet. 2008 Oct;45(10):639-46.; and Machuca-Tzili L. et al. “Clinical and molecular aspects of the myotonic dystrophies: a review.” Muscle Nerve. 2005 Ju1;32(1):1-18.; the contents of each of which are incorporated herein by reference in their entireties.

[0546] In some embodiments, an oligonucleotide provided herein is an antisense oligonucleotide targeting DMPK. In some embodiments, the oligonucleotide targeting is any one of the antisense oligonucleotides (e.g., a Gapmer) targeting DMPK as described in U.S. Pat. Application Publication US20160304877A1, published on Oct. 20, 2016, entitled “Compounds And Methods For Modulation Of Dystrophia Myotonica-Protein Kinase (DMPK) Expression,” incorporated herein by reference. In some embodiments, the DMPK targeting oligonucleotide targets a region of the DMPK gene sequence as set forth in Genbank accession No. NM_001081560.2 or as set forth in Genbank accession No. NG_009784.1.

[0547] In some embodiments, the DMPK targeting oligonucleotide comprises a nucleotide sequence comprising a region complementary to a target region that is at least 10 continuous nucleotides (e.g., at least 10, at least 12, at least 14, at least 16, or more continuous nucleotides) in Genbank accession No. NM_001081560.2.

[0548] In some embodiments, the DMPK targeting oligonucleotide comprise a gapmer motif. “Gapmer” means a chimeric antisense compound in which an internal region having a plurality of nucleotides that support RNase H cleavage is positioned between external regions having one or more nucleotides, wherein the nucleotides comprising the internal region are chemically distinct from the nucleotide or nucleotides comprising the external regions. The internal region can be referred to as a “gap segment” and the external regions can be referred to as “wing segments.” In some embodiments, the DMPK targeting oligonucleotide comprises one or more modified nucleotides, and/or (e.g., and) one or more modified internucleotide linkages. In some embodiments, the internucleotide linkage is a phosphorothioate linkage. In some embodiments, the oligonucleotide comprises a full phosphorothioate backbone. In some embodiments, the oligonucleotide is a DNA gapmer with cET ends (e.g., 3-10-3; cET-DNA-cET). In some embodiments, the DMPK targeting oligonucleotide comprises one or more 6′-(S)-CH₃ biocyclic nucleotides, one or more P-D-2′-deoxyribonucleotides, and/or (e.g., and) one or more 5-methyl-cytosine nucleotides.

### Dux4/fshd

[0549] In some embodiments, examples of oligonucleotides useful for targeting DUX4, e.g., for the treatment of FSHD, are provided in US Pat. No. 9,988,628, published on Feb. 2, 2017, entitled “AGENTS USEFUL IN TREATING FACIOSCAPULOHUMERAL MUSCULAR DYSTROPHY”; US Pat. No. 9,469,851, published Oct. 30, 2014, entitled “RECOMBINANT VIRUS PRODUCTS AND METHODS FOR INHIBITING EXPRESSION OF DUX4”; U.S. Pat. Application Publication 20120225034, published on Sep. 6, 2012, entitled “AGENTS USEFUL IN TREATING FACIOSCAPULOHUMERAL MUSCULAR DYSTROPHY”; PCT Pat. Application Publication Number WO 2013/120038, published on Aug. 15, 2013, entitled “MORPHOLINO TARGETING DUX4 FOR TREATING FSHD”; Chen et al., “Morpholino-mediated Knockdown of DUX4 Toward Facioscapulohumeral Muscular Dystrophy Therapeutics,” Molecular Therapy, 2016, 24:8, 1405-1411.; and Ansseau et al., “Antisense Oligonucleotides Used to Target the DUX4 mRNA as Therapeutic Approaches in Facioscapulohumeral Muscular Dystrophy (FSHD),” Genes, 2017, 8, 93.; the contents of each of which are incorporated herein in their entireties. In some embodiments, the oligonucleotide is an antisense oligonucleotide, a morpholino, a siRNA, a shRNA, or another nucleotide which hybridizes with the target DUX4 gene or mRNA.

[0550] In some embodiments, e.g., for the treatment of FSHD, oligonucleotides may have a region of complementarity to a hypomethylated, contracted D4Z4 repeat, as in Daxinger, et al., “Genetic and Epigenetic Contributors to FSHD,” published in Curr Opin Genet Dev in 2015, Lim J-W, et al., DICER/AGO-dependent epigenetic silencing of D4Z4 repeats enhanced by exogenous siRNA suggests mechanisms and therapies for FSHD Hum Mol Genet. 2015 Sep 1; 24(17): 4817-4828, the contents of each of which are incorporated in their entireties.

### Dnm2 / Cnm

[0551] In some embodiments, examples of oligonucleotides useful for targeting DNM2, e.g., for the treatment of CNM, are provided in US Pat. Application Publication Number 20180142008, published on May 24, 2018, entitled “DYNAMIN 2 INHIBITOR FOR THE TREATMENT OF DUCHENNE’S MUSCULAR DYSTROPHY”, and in PCT Application Publication Number WO 2018/100010A1, published on Jun. 7, 2018, entitled “ALLELE-SPECIFIC SILENCING THERAPY FOR DYNAMIN 2-RELATED DISEASES”. For example, in some embodiments, the oligonucleotide is a RNAi, an antisense nucleic acid, a siRNA, or a ribozyme that interferes specifically with DNM2 expression. Other examples of oligonucleotides useful for targeting DNM2 are provided in Tasfaout, et al., “Single Intramuscular Injection of AAV-shRNA Reduces DNM2 and Prevents Myotubular Myopathy in Mice,” published in Mol. Ther. on Apr. 4, 2018, and in Tasfaout, et al., “Antisense oligonucleotide-mediated Dnm2 knockdown prevents and reverts myotubular myopathy in mice,” Nature Communications volume 8, Article number: 15661 (2017). In some embodiments, the oligonucleotide is a shRNA or a morpholino that efficiently targets DNM2 mRNA. In some embodiments, the oligonucleotide encodes wild-type DNM2 which is resistant to miR-133 activity, as in Todaka, et al. “Overexpression of NF90-NF45 Represses Myogenic MicroRNA Biogenesis, Resulting in Development of Skeletal Muscle Atrophy and Centronuclear Muscle Fibers,” published in Mol. Cell Biol. in July 2015 Further examples of oligonucleotides useful for targeting DNM2 are provided in Gibbs, et al., “Two Dynamin-2 Genes are Required for Normal Zebrafish Development” published in PLoS One in 2013, the contents of each of which are incorporated herein in their entirety.

[0552] In some embodiments, e.g., for the treatment of CNM, the oligonucleotide may have a region of complementarity to a mutant in DNM2 associated with CNM, as in Böhm et al, “Mutation Spectrum in the Large GTPase Dynamin 2, and Genotype-Phenotype Correlation in Autosomal Dominant Centronuclear Myopathy,” as published in Hum. Mutat. in 2012, the contents of which are incorporated herein in its entirety.

### Pompe Disease

[0553] In some embodiments, e.g., for the treatment of Pompe disease, an oligonucleotide mediates exon 2 inclusion in a GAA disease allele as in van der Wal, et al., “GAA Deficiency in Pompe Disease is Alleviated by Exon Inclusion in iPSC-Derived Skeletal Muscle Cells,” Mol Ther Nucleic Acids. 2017 Jun 16; 7: 101-115, the contents of which are incorporated herein by reference. Accordingly, in some embodiments, the oligonucleotide may have a region of complementarity to a GAA disease allele.

[0554] In some embodiments, e.g., for the treatment of Pompe disease, an oligonucleotide, such as an RNAi or antisense oligonucleotide, is utilized to suppress expression of wild-type GYS1 in muscle cells, as reported, for example, in Clayton, et al., “Antisense Oligonucleotide-mediated Suppression of Muscle Glycogen Synthase 1 Synthesis as an Approach for Substrate Reduction Therapy of Pompe Disease,” published in Mol Ther Nucleic Acids in 2017, or US Patent Application Publication Number 2017182189, published on Jun. 29, 2017, entitled “INHIBITING OR DOWNREGULATING GLYCOGEN SYNTHASE BY CREATING PREMATURE STOP CODONS USING ANTISENSE OLIGONUCLEOTIDES”, the contents of which are incorporated herein by reference. Accordingly, in some embodiments, oligonucleotides may have an antisense strand having a region of complementarity to a sequence a human GYS1 sequence, corresponding to RefSeq number NM_002103.4 and/or (e.g., and) a mouse GYS1 sequence, corresponding to RefSeq number NM_030678.3.

### Acvr1 / Fop

[0555] In some embodiments, examples of oligonucleotides useful for targeting ACVR1, e.g., for the treatment of FOP, are provided in US Pat. Application 2009/0253132, published Oct. 8, 2009, “Mutated ACVR1 for diagnosis and treatment of fibrodyplasia ossificans progressiva (FOP)”; WO 2015/152183, published Oct. 8, 2015, “Prophylactic agent and therapeutic agent for fibrodysplasia ossificans progressive”; Lowery, J.W. et al, “Allele-specific RNA Interference in FOP -Silencing the FOP gene”, GENE THERAPY, vol. 19, 2012, pages 701 - 702; Takahashi, M. et al. “Disease-causing allele-specific silencing against the ALK2 mutants, R206H and G356D, in fibrodysplasia ossificans progressiva” Gene Therapy (2012) 19, 781-785; Shi, S. et al. “Antisense-Oligonucleotide Mediated Exon Skipping in Activin-Receptor-Like Kinase 2: Inhibiting the Receptor That Is Overactive in Fibrodysplasia Ossificans Progressiva” Plos One, July 2013, Vol 8:7, e69096.; US Pat. Application 2017/0159056, published Jun. 8, 2017, “Antisense oligonucleotides and methods of use thereof; U.S. Pat. No. 8,859,752, issued Oct. 4, 2014, “SIRNA-based therapy of Fibrodyplasia Ossificans Progressiva (FOP)”; WO 2004/094636, published Nov. 4, 2004, “Effective sirna knock-down constructs”, the contents of each of which are incorporated herein in their entireties.

### FXN / Friedreich’s Ataxia

[0556] In some embodiments, examples of oligonucleotides useful for targeting FXN and/or (e.g., and) otherwise compensating for frataxin deficiency, e.g., for the treatment of Friedreich Ataxia, are provided in Li, L. et al “Activating frataxin expression by repeat-targeted nucleic acids” Nat. Comm. 2016, 7:10606.; WO 2016/094374, published Jun. 16, 2016, “Compositions and methods for treatment of friedreich’s ataxia.”; WO 2015/020993, published Feb. 12, 2015, “RNAi COMPOSITIONS AND METHODS FOR TREATMENT OF FRIEDREICH’S ATAXIA”; WO 2017/186815, published Nov. 2, 2017, “Antisense oligonucleotides for enhanced expression of frataxin”; WO 2008/018795, published Feb. 14, 2008, “Methods and means for treating dna repeat instability associated genetic disorders”; U.S. Pat. Application 2018/0028557, published Feb. 1, 2018, “Hybrid oligonucleotides and uses thereof; WO 2015/023975, published Feb. 19, 2015, “Compositions and methods for modulating RNA”; WO 2015/023939, published Feb. 19, 2015, “Compositions and methods for modulating expression of frataxin”; U.S. Pat. Application 2017/0281643, published Oct. 5, 2017, “Compounds and methods for modulating frataxin expression”; Li L. et al., “Activating frataxin expression by repeat-targeted nucleic acids” Nature Communications, Published 4 Feb. 2016; and Li L. et al. “Activation of Frataxin Protein Expression by Antisense Oligonucleotides Targeting the Mutant Expanded Repeat” Nucleic Acid Ther. 2018 Feb;28(1):23-33., the contents of each of which are incorporated herein in their entireties.

[0557] In some embodiments, an oligonucleotide payload is configured (e.g., as a gapmer or RNAi oligonucleotide) for inhibiting expression of a natural antisense transcript that inhibits FXN expression, e.g., as disclosed in U.S. Pat. No. 9,593,330, filed Jun. 9, 2011, “Treatment of frataxin (FXN) related diseases by inhibition of natural antisense transcript to FXN”, the contents of which are incorporated herein by reference in its entirety.

[0558] Examples of oligonucleotides for promoting FXN gene editing include WO 2016/094845, published Jun. 16, 2016, “Compositions and methods for editing nucleic acids in cells utilizing oligonucleotides”; WO 2015/089354, published Jun. 18, 2015, “Compositions and methods of use of CRISPR-Cas systems in nucleotide repeat disorders”; WO 2015/139139, published Sep. 24, 2015, “CRISPR-based methods and products for increasing frataxin levels and uses thereof; and WO 2018/002783, published Jan. 4, 2018, “Materials and methods for treatment of Friedreich ataxia and other related disorders”, the contents of each of which are incorporated herein in their entireties.

[0559] Examples of oligonucleotides for promoting FXN gene expression through targeting of non-FXN genes, e.g. epigenetic regulators of FXN, include WO 2015/023938, published Feb. 19, 2015, “Epigenetic regulators of frataxin”, the contents of which are incorporated herein in its entirety.

[0560] In some embodiments, oligonucleotides may have a region of complementarity to a sequence set forth as: a FXN gene from humans (Gene ID 2395; NC_000009.12) and/or (e.g., and) a FXN gene from mice (Gene ID 14297; NC_000085.6). In some embodiments, the oligonucleotide may have region of complementarity to a mutant form of FXN, for example as reported in e.g., Montermini, L. et al. “The Friedreich ataxia GAA triplet repeat: premutation and normal alleles.” Hum. Molec. Genet., 1997, 6: 1261-1266.; Filla, A. et al. “The relationship between trinucleotide (GAA) repeat length and clinical features in Friedreich ataxia.” Am. J. Hum. Genet. 1996, 59: 554-560.; Pandolfo, M. Friedreich ataxia: the clinical picture. J. Neurol. 2009, 256, 3-8.; the contents of each of which are incorporated herein by reference in their entireties.

### DMD / Dystrophinopathies

[0561] Examples of oligonucleotides useful for targeting DMD are provided in U.S. Pat. Application Publication US20190330626A1, published on Oct. 31, 2019, entitled “COMPOSITIONS AND METHODS FOR USE IN DYSTROPHIN TRANSCRIPT”; U.S. Pat. Application Publication US20100130591A1, published on May 27, 2010, entitled “MULTIPLE EXON SKIPPING COMPOSITIONS FOR DMD”; U.S. Patent No. 8,361,979, issued Jan. 29, 2013, entitled “MEANS AND METHOD FOR INDUCING EXON-SKIPPING”; U.S. Pat. Application Publication 20120059042, published Mar. 8, 2012, entitled “METHOD FOR EFFICIENT EXON (44) SKIPPING IN DUCHENNE MUSCULAR DYSTROPHY AND ASSOCIATED MEANS; U.S. Pat. Application Publication 20140329881, published Nov. 6, 2014, entitled “EXON SKIPPING COMPOSITIONS FOR TREATING MUSCULAR DYSTROPHY”; U.S. Pat. No. 8,232,384, issued Jul. 31, 2012, entitled “ANTISENSE OLIGONUCLEOTIDES FOR INDUCING EXON SKIPPING AND METHODS OF USE THEREOF”; U.S. Pat. Application Publication 20120022134A1, published Jan. 26, 2012, entitled “METHODS AND MEANS FOR EFFICIENT SKIPPING OF EXON 45 IN DUCHENNE MUSCULAR DYSTROPHY PRE-MRNA; U.S. Pat. Application Publication 20120077860, published Mar. 29, 2012, entitled “ADENO-ASSOCIATED VIRAL VECTOR FOR EXON SKIPPING IN A GENE ENCODING A DISPENSABLE DOMAN PROTEIN”; U.S. Pat. No. 8,324,371, issued Dec. 4, 2012, entitled “OLIGOMERS”; U.S. Pat. No. 9,078,911, issued Jul. 14, 2015, entitled “ANTISENSE OLIGONUCLEOTIDES”; U.S. Pat. No. 9,079,934, issued Jul. 14, 2015, entitled “ANTISENSE NUCLEIC ACIDS”; U.S. Pat. No. 9,034,838, issued May 19, 2015, entitled “MIR-31 IN DUCHENNE MUSCULAR DYSTROPHY THERAPY”; and International Patent Publication WO2017062862A3, published Apr. 13, 2017, entitled “OLIGONUCLEOTIDE COMPOSITIONS AND METHODS THEREOF”; the contents of each of which are incorporated herein in their entireties.

[0562] Examples of oligonucleotides for promoting DMD gene editing include International Patent Publication WO2018053632A1, published Mar. 29, 2018, entitled “METHODS OF MODIFYING THE DYSTROPHIN GENE AND RESTORING DYSTROPHIN EXPRESSION AND USES THEREOF”; International Patent Publication W02017049407A1, published Mar. 30, 2017, entitled “MODIFICATION OF THE DYSTROPHIN GENE AND USES THEREOF”; International Patent Publication W02016161380A1, published Oct. 6, 2016, entitled “CRISPR/CAS-RELATED METHODS AND COMPOSITIONS FOR TREATING DUCHENNE MUSCULAR DYSTROPHY AND BECKER MUSCULAR DYSTROPHY”; International Patent Publication WO2017095967, published Jun. 8, 2017, entitled “THERAPEUTIC TARGETS FOR THE CORRECTION OF THE HUMAN DYSTROPHIN GENE BY GENE EDITING AND METHODS OF USE”; International Patent Publication W02017072590A1, published May 4, 2017, entitled “MATERIALS AND METHODS FOR TREATMENT OF DUCHENNE MUSCULAR DYSTROPHY”; International Patent Publication W02018098480A1, published May 31, 2018, entitled “PREVENTION OF MUSCULAR DYSTROPHY BY CRISPR/CPF1-MEDIATED GENE EDITING”; U.S. Pat. Application Publication US20170266320A1, published Sep. 21, 2017, entitled “RNA-Guided Systems for In Vivo Gene Editing”; International Patent Publication WO2016025469A1, published Feb. 18, 2016, entitled “PREVENTION OF MUSCULAR DYSTROPHY BY CRISPR/CAS9-MEDIATED GENE EDITING”; U.S. Pat. Application Publication 2016/0201089, published Jul. 14, 2016, entitled “RNA-GUIDED GENE EDITING AND GENE REGULATION”; and U.S. Pat. Application Publication 2013/0145487, published Jun. 6, 2013, entitled “MEGANUCLEASE VARIANTS CLEAVING A DNA TARGET SEQUENCE FROM THE DYSTROPHN GENE AND USES THEREOF”, the contents of each of which are incorporated herein in their entireties. In some embodiments, an oligonucleotide may have a region of complementarity to DMD gene sequences of multiple species, e.g., selected from human, mouse and non-human species.

[0563] In some embodiments, the oligonucleotide may have region of complementarity to a mutant DMD allele, for example, a DMD allele with at least one mutation in any of exons 1-79 of DMD in humans that leads to a frameshift and improper RNA splicing/processing.

### MYH7 / Hypertrophic Cardiomyopathy

[0564] Examples of oligonucleotides useful as payloads, e.g., for targeting MYH7, are provided in US Pat. Application Publication 20180094262, published on Apr. 5, 2018, entitled Inhibitors of MYH7B and Uses Thereof; U.S. Pat. Application Publication 20160348103, published on Dec. 1, 2016, entitled Oligonucleotides and Methods for Treatment of Cardiomyopathy Using RNA Interference; U.S. Pat. Application Publication 20160237430, published on Aug. 18, 2016, entitled “Allele-specific RNA Silencing for the Treatment of Hypertrophic Cardiomyopathy”; U.S. Pat. Application Publication 20160032286, published on Feb. 4, 2016, entitled “Inhibitors of MYH7B and Uses Thereof”; U.S. Pat. Application Publication 20140187603, published on Jul. 3, 2014, entitled “MicroRNA Inhibitors Comprising Locked Nucleotides”; U.S. Pat. Application Publication 20140179764, published on Jun. 26, 2014, entitled “Dual Targeting of miR-208 and miR-499 in the Treatment of Cardiac Disorders”; U.S. Pat. Application Publication 20120114744, published on May 10, 2012, entitled “Compositions and Methods to Treat Muscular and Cardiovascular Disorders”; the contents of each of which are incorporated herein in their entireties.

[0565] In some embodiments, the oligonucleotide may target IncRNA or mRNA, e.g., for degradation. In some embodiments, the oligonucleotide may target, e.g., for degradation, a nucleic acid encoding a protein involved in a mismatch repair pathway, e.g., MSH2, MutLalpha, MutSbeta, MutLalpha. Non-limiting examples of proteins involved in mismatch repair pathways, for which mRNAs encoding such proteins may be targeted by oligonucleotides described herein, are described in Iyer, R.R. et al., “DNA triplet repeat expansion and mismatch repair” Annu Rev Biochem. 2015;84:199-226.; and Schmidt M.H. and Pearson C.E., “Disease-associated repeat instability and mismatch repair” DNA Repair (Amst). 2016 Feb;38:117-26.

[0566] In some embodiments, any one of the oligonucleotides described herein can be in salt form, e.g., as sodium, potassium, or magnesium salts.

[0567] In some embodiments, the 5′ or 3′ nucleoside (e.g., terminal nucleoside) of any one of the oligonucleotides described herein is conjugated to an amine group, optionally via a spacer. In some embodiments, the spacer comprises an aliphatic moiety. In some embodiments, the spacer comprises a polyethylene glycol moiety. In some embodiments, a phosphodiester linkage is present between the spacer and the 5′ or 3′ nucleoside of the oligonucleotide. In some embodiments, the 5′ or 3′ nucleoside (e.g., terminal nucleoside) of any of the oligonucleotides described herein is conjugated to a spacer that is a substituted or unsubstituted aliphatic, substituted or unsubstituted heteroaliphatic, substituted or unsubstituted carbocyclylene, substituted or unsubstituted heterocyclylene, substituted or unsubstituted arylene, substituted or unsubstituted heteroarylene, -O-, -N(R^{A})-, -S-, -C(=O)-, -C(=O)O-, -C(=O)NR^{A}-, -NR^{A}C(=O)-, -NR^{A}C(=O)R^{A}-, -C(=O)R^{A}-, -NR^{A}C(=O)O-, -NR^{A}C(=O)N(R^{A})-, -OC(=O)-, -OC(=O)O-, -OC(=O)N(R^{A})-, -S(O)₂NR^{A}-, -NR^{A}S(O)₂-, or a combination thereof; each R^{A} is independently hydrogen or substituted or unsubstituted alkyl. In certain embodiments, the spacer is a substituted or unsubstituted alkylene, substituted or unsubstituted heterocyclylene, substituted or unsubstituted heteroarylene, -O-, -N(R^{A})-, or -C(=O)N(R^{A})₂, or a combination thereof.

[0568] In some embodiments, the 5′ or 3′ nucleoside of any one of the oligonucleotides described herein is conjugated to a compound of the formula —NH₂—(CH₂)ₙ—, wherein n is an integer from 1 to 12. In some embodiments, n is 6, 7, 8, 9, 10, 11, or 12. In some embodiments, a phosphodiester linkage is present between the compound of the formula NH₂—(CH₂)ₙ— and the 5′ or 3′ nucleoside of the oligonucleotide. In some embodiments, a compound of the formula NH₂—(CH₂)₆— is conjugated to the oligonucleotide via a reaction between 6-amino-1-hexanol (NH₂—(CH₂)₆—OH) and the 5′ phosphate of the oligonucleotide.

[0569] In some embodiments, the oligonucleotide is conjugated to a targeting agent, e.g., a muscle targeting agent such as an anti-TfR antibody, e.g., via the amine group.

### a. Oligonucleotide Size/Sequence

[0570] Oligonucleotides may be of a variety of different lengths, e.g., depending on the format. In some embodiments, an oligonucleotide is 7, 8, 9, 10, 11, 12, 13, 14, 15, 16, 17, 18, 19, 20, 21, 22, 23, 24, 25, 26, 27, 28, 29, 30, 35, 40, 45, 50, 75, or more nucleotides in length. In a some embodiments, the oligonucleotide is 8 to 50 nucleotides in length, 8 to 40 nucleotides in length, 8 to 30 nucleotides in length, 10 to 15 nucleotides in length, 10 to 20 nucleotides in length, 15 to 25 nucleotides in length, 21 to 23 nucleotides in lengths, etc.

[0571] In some embodiments, a complementary nucleic acid sequence of an oligonucleotide for purposes of the present disclosure is specifically hybridizable or specific for the target nucleic acid when binding of the sequence to the target molecule (e.g., mRNA) interferes with the normal function of the target (e.g., mRNA) to cause a loss of activity (e.g., inhibiting translation) or expression (e.g., degrading a target mRNA) and there is a sufficient degree of complementarity to avoid non-specific binding of the sequence to non-target sequences under conditions in which avoidance of non-specific binding is desired, e.g., under physiological conditions in the case of in vivo assays or therapeutic treatment, and in the case of in vitro assays, under conditions in which the assays are performed under suitable conditions of stringency. Thus, in some embodiments, an oligonucleotide may be at least 80%, at least 85%, at least 90%, at least 91%, at least 92%, at least 93%, at least 94%, at least 95%, at least 96%, at least 97%, at least 98%, at least 99% or 100% complementary to the consecutive nucleotides of an target nucleic acid. In some embodiments a complementary nucleotide sequence need not be 100% complementary to that of its target to be specifically hybridizable or specific for a target nucleic acid.

[0572] In some embodiments, an oligonucleotide comprises region of complementarity to a target nucleic acid that is in the range of 8 to 15, 8 to 30, 8 to 40, or 10 to 50, or 5 to 50, or 5 to 40 nucleotides in length. In some embodiments, a region of complementarity of an oligonucleotide to a target nucleic acid is 5, 6, 7, 8, 9, 10, 11, 12, 13, 14, 15, 16, 17, 18, 19, 20, 21, 22, 23, 24, 25, 26, 27, 28, 29, 30, 31, 32, 33, 34, 35, 36, 37, 38, 39, 40, 41, 42, 43, 44, 45, 46, 47, 48, 49, or 50 nucleotides in length. In some embodiments, the region of complementarity is complementary with at least 8 consecutive nucleotides of a target nucleic acid. In some embodiments, an oligonucleotide may contain 1, 2 or 3 base mismatches compared to the portion of the consecutive nucleotides of target nucleic acid. In some embodiments the oligonucleotide may have up to 3 mismatches over 15 bases, or up to 2 mismatches over 10 bases.

[0573] In some embodiments, an oligonucleotide comprises a strand that comprises at least 10, 11, 12, 13, 14, 15, 16, 17, 18, 19, or 20 consecutive nucleotides of a sequence at set forth in any one of SEQ ID NOs: 259-261, 309-12147, and 12172- 28939. In some embodiments, an oligonucleotide comprises a strand that comprises a sequence as set forth in any one of SEQ ID NOs: 259-261, 309-12147, and 12172- 28939. In some embodiments, an oligonucleotide comprises a sequence that shares at least 70%, 75%, 80%, 85%, 90%, 95%, or 97% sequence identity with at least 12 or at least 15 consecutive nucleotides of any one of SEQ ID NOs: 259-261, 309-12147, and 12172- 28939.

[0574] In some embodiments, an oligonucleotide comprises a sequence that targets a sequence as set forth in any one of SEQ ID NOs: 6240-12147, 12172-19511, and 26852-27896. In some embodiments, an oligonucleotide comprises at least 10, 11, 12, 13, 14, 15, 16, 17, 18, 19, or 20 nucleotides (e.g., consecutive nucleotides) that are complementary to a sequence as set forth in any one of SEQ ID NOs: 6240-12147, 12172-19511, and 26852-27896. In some embodiments, an oligonucleotide comprises a sequence that is at least 70%, 75%, 80%, 85%, 90%, 95%, or 97% complementary with at least 12 or at least 15 consecutive nucleotides of any one of SEQ ID NOs: 6240-12147, 12172-19511, and 26852-27896.

[0575] In some embodiments, the oligonucleotide comprises a region of complementarity to a target sequence as set forth in any one of SEQ ID NO: 6240-12147, 12172-19511, and 26852-27896. In some embodiments, the region of complementarity is at least 8, at least 9, at least 10, at least 11, at least 12, at least 13, at least 14, at least 15, at least 16, at least 17, at least 19 or at least 20 nucleotides in length. In some embodiments, the region of complementarity is 8, 9, 10, 11, 12, 13, 14, 15, 16, 17, 18, 19, or 20 nucleotides in length. In some embodiments, the region of complementarity is in the range of 8 to 20, 10 to 20 or 15 to 20 nucleotides in length. In some embodiments, the region of complementarity is fully complementarity with all or a portion of its target sequence. In some embodiments, the region of complementarity includes 1, 2, 3 or more mismatches.

[0576] In some embodiments, the oligonucleotide is complementary (e.g., at least 85% at least 90%, at least 95%, or 100%) to a target sequence of any one of the oligonucleotides provided herein . In some embodiments, such target sequence is 100% complementary to the oligonucleotide provided herein.

[0577] In some embodiments, any one or more of the thymine bases (T’s) in any one of the oligonucleotides provided herein may optionally be uracil bases (U’s), and/or any one or more of the U’s may optionally be T’s.

### b. Oligonucleotide Modifications

[0578] The oligonucleotides described herein may be modified, e.g., comprise a modified sugar moiety, a modified internucleoside linkage, a modified nucleotide and/or (e.g., and) combinations thereof. In addition, in some embodiments, oligonucleotides may exhibit one or more of the following properties: do not mediate alternative splicing; are not immune stimulatory; are nuclease resistant; have improved cell uptake compared to unmodified oligonucleotides; are not toxic to cells or mammals; have improved endosomal exit internally in a cell; minimizes TLR stimulation; or avoid pattern recognition receptors. Any of the modified chemistries or formats of oligonucleotides described herein can be combined with each other. For example, one, two, three, four, five, or more different types of modifications can be included within the same oligonucleotide.

[0579] In some embodiments, certain nucleotide modifications may be used that make an oligonucleotide into which they are incorporated more resistant to nuclease digestion than the native oligodeoxynucleotide or oligoribonucleotide molecules; these modified oligonucleotides survive intact for a longer time than unmodified oligonucleotides. Specific examples of modified oligonucleotides include those comprising modified backbones, for example, modified internucleoside linkages such as phosphorothioates, phosphotriesters, methyl phosphonates, short chain alkyl or cycloalkyl intersugar linkages or short chain heteroatomic or heterocyclic intersugar linkages. Accordingly, oligonucleotides of the disclosure can be stabilized against nucleolytic degradation such as by the incorporation of a modification, e.g., a nucleotide modification.

[0580] In some embodiments, an oligonucleotide may be of up to 50 or up to 100 nucleotides in length in which 2 to 10, 2 to 15, 2 to 16, 2 to 17, 2 to 18, 2 to 19, 2 to 20, 2 to 25, 2 to 30, 2 to 40, 2 to 45, or more nucleotides of the oligonucleotide are modified nucleotides. The oligonucleotide may be of 8 to 30 nucleotides in length in which 2 to 10, 2 to 15, 2 to 16, 2 to 17, 2 to 18, 2 to 19, 2 to 20, 2 to 25, 2 to 30 nucleotides of the oligonucleotide are modified nucleotides. The oligonucleotide may be of 8 to 15 nucleotides in length in which 2 to 4, 2 to 5, 2 to 6, 2 to 7, 2 to 8, 2 to 9, 2 to 10, 2 to 11, 2 to 12, 2 to 13, 2 to 14 nucleotides of the oligonucleotide are modified nucleotides. Optionally, the oligonucleotides may have every nucleotide except 1, 2, 3, 4, 5, 6, 7, 8, 9, or 10 nucleotides modified. Oligonucleotide modifications are described further herein.

### c. Modified Nucleosides

[0581] In some embodiments, the oligonucleotide described herein comprises at least one nucleoside modified at the 2′ position of the sugar. In some embodiments, an oligonucleotide comprises at least one 2′-modified nucleoside. In some embodiments, all of the nucleosides in the oligonucleotide are 2′-modified nucleosides.

[0582] In some embodiments, the oligonucleotide described herein comprises one or more non-bicyclic 2′-modified nucleosides, e.g., 2′-deoxy, 2′-fluoro (2′-F), 2′-O-methyl (2′-O-Me), 2′-O-methoxyethyl (2′-MOE), 2′-O-aminopropyl (2′-O-AP), 2’-O-dimethylaminoethyl (2′-O-DMAOE), 2′-O-dimethylaminopropyl (2′-O-DMAP), 2’-O-dimethylaminoethyloxyethyl (2′-O-DMAEOE), or 2′-O-N-methylacetamido (2′-O-NMA) modified nucleoside.

[0583] In some embodiments, the oligonucleotide described herein comprises one or more 2′- 4′ bicyclic nucleosides in which the ribose ring comprises a bridge moiety connecting two atoms in the ring, e.g., connecting the 2′ -0 atom to the 4′- C atom via a methylene (LNA) bridge, an ethylene (ENA) bridge, or a (S)-constrained ethyl (cEt) bridge. Examples of LNAs are described in International Patent Application Publication WO/2008/043753, published on Apr. 17, 2008, and entitled “RNA Antagonist Compounds For The Modulation Of PCSK9”, the contents of which are incorporated herein by reference in its entirety. Examples of ENAs are provided in International Patent Publication No. WO 2005/042777, published on May 12, 2005, and entitled “APP/ENA Antisense”; Morita et al., Nucleic Acid Res., Suppl 1:241-242, 2001; Surono et al., Hum. Gene Ther., 15:749-757, 2004; Koizumi, Curr. Opin. Mol. Ther., 8:144-149, 2006 and Horie et al., Nucleic Acids Symp. Ser (Oxf), 49:171-172, 2005; the disclosures of which are incorporated herein by reference in their entireties. Examples of cEt are provided in US Pat. 7,101,993; 7,399,845 and 7,569,686, each of which is herein incorporated by reference in its entirety.

[0584] In some embodiments, the oligonucleotide comprises a modified nucleoside disclosed in one of the following United States Patent or Patent Application Publications: U.S. Pat. 7,399,845, issued on Jul. 15, 2008, and entitled “6-Modified Bicyclic Nucleic Acid Analogs”; U.S. Pat. 7,741,457, issued on Jun. 22, 2010, and entitled “6-Modified Bicyclic Nucleic Acid Analogs”; U.S. Pat. 8,022,193, issued on Sep. 20, 2011, and entitled “ 6-Modified Bicyclic Nucleic Acid Analogs; U.S. Pat. 7,569,686, issued on Aug. 4, 2009, and entitled “Compounds And Methods For Synthesis Of Bicyclic Nucleic Acid Analogs”; U.S. Pat. 7,335,765, issued on Feb. 26, 2008, and entitled “Novel Nucleoside And Oligonucleotide Analogues”; U.S. Pat. 7,314,923, issued on Jan. 1, 2008, and entitled “Novel Nucleoside And Oligonucleotide Analogues”; U.S. Pat. 7,816,333, issued on Oct. 19, 2010, and entitled “Oligonucleotide Analogues And Methods Utilizing The Same” and U.S. Publication No. 2011/0009471 now U.S. Pat. 8,957,201, issued on Feb. 17, 2015, and entitled “Oligonucleotide Analogues And Methods Utilizing The Same”, the entire contents of each of which are incorporated herein by reference for all purposes.

[0585] In some embodiments, the oligonucleotide comprises at least one modified nucleoside that results in an increase in Tm of the oligonucleotide in a range of 1° C., 2° C., 3° C., 4° C., or 5° C. compared with an oligonucleotide that does not have the at least one modified nucleoside. The oligonucleotide may have a plurality of modified nucleosides that result in a total increase in Tm of the oligonucleotide in a range of 2° C., 3° C., 4° C., 5° C., 6° C., 7° C., 8° C., 9° C., 10° C., 15° C., 20° C., 25° C., 30° C., 35° C., 40° C., 45° C. or more compared with an oligonucleotide that does not have the modified nucleoside.

[0586] The oligonucleotide may comprise a mix of nucleosides of different kinds. For example, an oligonucleotide may comprise a mix of 2′-deoxyribonucleosides or ribonucleosides and 2′-fluoro modified nucleosides. An oligonucleotide may comprise a mix of deoxyribonucleosides or ribonucleosides and 2′-O-Me modified nucleosides. An oligonucleotide may comprise a mix of 2′-fluoro modified nucleosides and 2′-O-Me modified nucleosides. An oligonucleotide may comprise a mix of 2′-4′ bicyclic nucleosides and 2′-MOE, 2′-fluoro, or 2′-O-Me modified nucleosides. An oligonucleotide may comprise a mix of non-bicyclic 2′-modified nucleosides (e.g., 2′-MOE, 2′-fluoro, or 2′-O-Me) and 2′-4′ bicyclic nucleosides (e.g., LNA, ENA, cEt).

[0587] The oligonucleotide may comprise alternating nucleosides of different kinds. For example, an oligonucleotide may comprise alternating 2′-deoxyribonucleosides or ribonucleosides and 2′-fluoro modified nucleosides. An oligonucleotide may comprise alternating deoxyribonucleosides or ribonucleosides and 2′-O-Me modified nucleosides. An oligonucleotide may comprise alternating 2′-fluoro modified nucleosides and 2′-O-Me modified nucleosides. An oligonucleotide may comprise alternating 2′-4′ bicyclic nucleosides and 2′-MOE, 2′-fluoro, or 2-O-Me modified nucleosides. An oligonucleotide may comprise alternating non-bicyclic 2′-modified nucleosides (e.g., 2′-MOE, 2′-fluoro, or 2′-O-Me) and 2′-4′ bicyclic nucleosides (e.g., LNA, ENA, cEt).

[0588] In some embodiments, an oligonucleotide described herein comprises a 5 -vinylphosphonate modification, one or more abasic residues, and/or one or more inverted abasic residues.

### d. Internucleoside Linkages / Backbones

[0589] In some embodiments, oligonucleotide may contain a phosphorothioate or other modified internucleoside linkage. In some embodiments, the oligonucleotide comprises phosphorothioate internucleoside linkages. In some embodiments, the oligonucleotide comprises phosphorothioate internucleoside linkages between at least two nucleotides. In some embodiments, the oligonucleotide comprises phosphorothioate internucleoside linkages between all nucleotides. For example, in some embodiments, oligonucleotides comprise modified internucleoside linkages at the first, second, and/or (e.g., and) third internucleoside linkage at the 5′ or 3′ end of the nucleotide sequence.

[0590] Phosphorus-containing linkages that may be used include, but are not limited to, phosphorothioates, chiral phosphorothioates, phosphorodithioates, phosphotriesters, aminoalkylphosphotriesters, methyl and other alkyl phosphonates comprising 3′alkylene phosphonates and chiral phosphonates, phosphinates, phosphoramidates comprising 3′-amino phosphoramidate and aminoalkylphosphoramidates, thionophosphoramidates, thionoalkylphosphonates, thionoalkylphosphotriesters, and boranophosphates having normal 3′-5′ linkages, 2′-5′ linked analogs of these, and those having inverted polarity wherein the adjacent pairs of nucleoside units are linked 3′-5′ to 5′-3′ or 2′-5′ to 5′-2′; see U.S. Pat. Nos. 3,687,808; 4,469,863; 4,476,301; 5,023,243; 5, 177,196; 5,188,897; 5,264,423; 5,276,019; 5,278,302; 5,286,717; 5,321,131; 5,399,676; 5,405,939; 5,453,496; 5,455, 233; 5,466,677; 5,476,925; 5,519,126; 5,536,821; 5,541,306; 5,550,111; 5,563, 253; 5,571,799; 5,587,361; and 5,625,050.

[0591] In some embodiments, oligonucleotides may have heteroatom backbones, such as methylene(methylimino) or MMI backbones; amide backbones (see De Mesmaeker et al. Ace. Chem. Res. 1995, 28:366-374); morpholino backbones (see Summerton and Weller, U.S. Pat. No. 5,034,506); or peptide nucleic acid (PNA) backbones (wherein the phosphodiester backbone of the oligonucleotide is replaced with a polyamide backbone, the nucleotides being bound directly or indirectly to the aza nitrogen atoms of the polyamide backbone, see Nielsen et al., Science 1991, 254, 1497).

### e. Stereospecific Oligonucleotides

[0592] In some embodiments, internucleotidic phosphorus atoms of oligonucleotides are chiral, and the properties of the oligonucleotides are adjusted based on the configuration of the chiral phosphorus atoms. In some embodiments, appropriate methods may be used to synthesize P-chiral oligonucleotide analogs in a stereocontrolled manner (e.g., as described in Oka N, Wada T, Stereocontrolled synthesis of oligonucleotide analogs containing chiral internucleotidic phosphorus atoms. Chem Soc Rev. 2011 Dec;40(12):5829-43.) In some embodiments, phosphorothioate containing oligonucleotides are provided that comprise nucleoside units that are joined together by either substantially all Sp or substantially all Rp phosphorothioate intersugar linkages. In some embodiments, such phosphorothioate oligonucleotides having substantially chirally pure intersugar linkages are prepared by enzymatic or chemical synthesis, as described, for example, in U.S. Pat. 5,587,261, issued on Dec. 12, 1996, the contents of which are incorporated herein by reference in their entirety. In some embodiments, chirally controlled oligonucleotides provide selective cleavage patterns of a target nucleic acid. For example, in some embodiments, a chirally controlled oligonucleotide provides single site cleavage within a complementary sequence of a nucleic acid, as described, for example, in U.S. Pat. Application Publication 20170037399 A1, published on Feb. 2, 2017, entitled “CHIRAL DESIGN”, the contents of which are incorporated herein by reference in their entirety.

### f. Morpholinos

[0593] In some embodiments, the oligonucleotide may be a morpholino-based compounds. Morpholino-based oligomeric compounds are described in Dwaine A. Braasch and David R. Corey, Biochemistry, 2002, 41(14), 4503-4510); Genesis, volume 30, issue 3, 2001; Heasman, J., Dev. Biol., 2002, 243, 209-214; Nasevicius et al., Nat. Genet., 2000, 26, 216-220; Lacerra et al., Proc. Natl. Acad. Sci., 2000, 97, 9591-9596; and U.S. Pat. No. 5,034,506, issued Jul. 23, 1991. In some embodiments, the morpholino-based oligomeric compound is a phosphorodiamidate morpholino oligomer (PMO) (e.g., as described in Iverson, Curr. Opin. Mol. Ther., 3:235-238, 2001; and Wang et al., J. Gene Med., 12:354-364, 2010; the disclosures of which are incorporated herein by reference in their entireties).

### g. Peptide Nucleic Acids (PNAs)

[0594] In some embodiments, both a sugar and an internucleoside linkage (the backbone) of the nucleotide units of an oligonucleotide are replaced with novel groups. In some embodiments, the base units are maintained for hybridization with an appropriate nucleic acid target compound. One such oligomeric compound, an oligonucleotide mimetic that has been shown to have excellent hybridization properties, is referred to as a peptide nucleic acid (PNA). In PNA compounds, the sugar-backbone of an oligonucleotide is replaced with an amide containing backbone, for example, an aminoethylglycine backbone. The nucleobases are retained and are bound directly or indirectly to aza nitrogen atoms of the amide portion of the backbone. Representative publication that report the preparation of PNA compounds include, but are not limited to, U.S. Pat. Nos. 5,539,082; 5,714,331; and 5,719,262, each of which is herein incorporated by reference. Further teaching of PNA compounds can be found in Nielsen et al., Science, 1991, 254, 1497-1500.

### h. Gapmers

[0595] In some embodiments, an oligonucleotide described herein is a gapmer. A gapmer oligonucleotide generally has the formula 5′-X-Y-Z-3′, with X and Z as flanking regions around a gap region Y. In some embodiments, flanking region X of formula 5′-X-Y-Z-3′ is also referred to as X region, flanking sequence X, 5′ wing region X, or 5′ wing segment. In some embodiments, flanking region Z of formula 5′-X-Y-Z-3′ is also referred to as Z region, flanking sequence Z, 3′ wing region Z, or 3′ wing segment. In some embodiments, gap region Y of formula 5′-X-Y-Z-3′ is also referred to as Y region, Y segment, or gap-segment Y. In some embodiments, each nucleoside in the gap region Y is a 2′-deoxyribonucleoside, and neither the 5′ wing region X or the 3′ wing region Z contains any 2′-deoxyribonucleosides.

[0596] In some embodiments, the Y region is a contiguous stretch of nucleotides, e.g., a region of 6 or more DNA nucleotides, which are capable of recruiting an RNAse, such as RNAse H. In some embodiments, the gapmer binds to the target nucleic acid, at which point an RNAse is recruited and can then cleave the target nucleic acid. In some embodiments, the Y region is flanked both 5′ and 3′ by regions X and Z comprising high-affinity modified nucleosides, e.g., one to six high-affinity modified nucleosides. Examples of high affinity modified nucleosides include, but are not limited to, 2′-modified nucleosides (e.g., 2′-MOE, 2′0-Me, 2′-F) or 2′-4′ bicyclic nucleosides (e.g., LNA, cEt, ENA). In some embodiments, the flanking sequences X and Z may be of 1-20 nucleotides, 1-8 nucleotides, or 1-5 nucleotides in length. The flanking sequences X and Z may be of similar length or of dissimilar lengths. In some embodiments, the gap-segment Y may be a nucleotide sequence of 5-20 nucleotides, 5-15 twelve nucleotides, or 6-10 nucleotides in length.

[0597] In some embodiments, the gap region of the gapmer oligonucleotides may contain modified nucleotides known to be acceptable for efficient RNase H action in addition to DNA nucleotides, such as C4′-substituted nucleotides, acyclic nucleotides, and arabino-configured nucleotides. In some embodiments, the gap region comprises one or more unmodified internucleosides. In some embodiments, one or both flanking regions each independently comprise one or more phosphorothioate internucleoside linkages (e.g., phosphorothioate internucleoside linkages or other linkages) between at least two, at least three, at least four, at least five or more nucleotides. In some embodiments, the gap region and two flanking regions each independently comprise modified internucleoside linkages (e.g., phosphorothioate internucleoside linkages or other linkages) between at least two, at least three, at least four, at least five or more nucleotides.

[0598] A gapmer may be produced using appropriate methods. Representative U.S. Pats., U.S. Pat. Publications, and PCT publications that teach the preparation of gapmers include, but are not limited to, U.S. Pat. Nos. 5,013,830; 5,149,797; 5,220,007; 5,256,775; 5,366,878; 5,403,711; 5,491,133; 5,565,350; 5,623,065; 5,652,355; 5,652,356; 5,700,922; 5,898,031; 7,015,315; 7,101,993; 7,399,845; 7,432,250; 7,569,686; 7,683,036; 7,750,131; 8,580,756; 9,045,754; 9,428,534; 9,695,418; 10,017,764; 10,260,069; 9,428,534; 8,580,756; U.S. Pat. Publication Nos. US20050074801, US20090221685; US20090286969, US20100197762, and US20110112170; PCT publication Nos. WO2004069991; WO2005023825; WO2008049085 and WO2009090182; and EP Patent No. EP2,149,605, each of which is herein incorporated by reference in its entirety.

[0599] In some embodiments, a gapmer is 10-40 nucleosides in length. For example, a gapmer may be 10-40, 10-35, 10-30, 10-25, 10-20, 10-15, 15-40, 15-35, 15-30, 15-25, 15-20, 20-40, 20-35, 20-30, 20-25, 25-40, 25-35, 25-30, 30-40, 30-35, or 35-40 nucleosides in length. In some embodiments, a gapmer is 10, 11, 12, 13, 14, 15, 16, 17, 18, 19, 20, 21, 22, 23, 24, 25, 26, 27, 28, 29, 30, 31, 32, 33, 34, 35, 36, 37, 38, 39, or 40 nucleosides in length.

[0600] In some embodiments, the gap region Y in a gapmer is 5-20 nucleosides in length. For example, the gap region Y may be 5-20, 5-15, 5-10, 10-20, 10-15, or 15-20 nucleosides in length. In some embodiments, the gap region Y is 5, 6, 7, 8, 9, 10, 11, 12, 13, 14, 15, 16, 17, 18, 19, or 20 nucleosides in length. In some embodiments, each nucleoside in the gap region Y is a 2′-deoxyribonucleoside. In some embodiments, all nucleosides in the gap region Y are 2′-deoxyribonucleosides. In some embodiments, one or more of the nucleosides in the gap region Y is a modified nucleoside (e.g., a 2′ modified nucleoside such as those described herein). In some embodiments, one or more cytosines in the gap region Y are optionally 5-methyl-cytosines. In some embodiments, each cytosine in the gap region Y is a 5-methyl-cytosines.

[0601] In some embodiments, the 5′wing region of a gapmer (X in the 5′-X-Y-Z-3′ formula) and the 3′wing region of a gapmer (Z in the 5′-X-Y-Z-3′ formula) are independently 1-20 nucleosides long. For example, the 5′wing region of a gapmer (X in the 5′-X-Y-Z-3′ formula) and the 3′wing region of the gapmer (Z in the 5′-X-Y-Z-3′ formula) may be independently 1-20, 1-15, 1-10, 1-7, 1-5, 1-3, 1-2, 2-5, 2-7, 3-5, 3-7, 5-20, 5-15, 5-10, 10-20, 10-15, or 15-20 nucleosides long. In some embodiments, the 5′wing region of the gapmer (X in the 5′-X-Y-Z-3′ formula) and the 3′wing region of the gapmer (Z in the 5′-X-Y-Z-3′ formula) are independently 1, 2, 3, 4, 5, 6, 7, 8, 9, 10, 11, 12, 13, 14, 15, 16, 17, 18, 19, or 20 nucleosides long. In some embodiments, the 5′wing region of the gapmer (X in the 5′-X-Y-Z-3′ formula) and the 3′wing region of the gapmer (Z in the 5′-X-Y-Z-3′ formula) are of the same length. In some embodiments, the 5′wing region of the gapmer (X in the 5′-X-Y-Z-3′ formula) and the 3′wing region of the gapmer (Z in the 5′-X-Y-Z-3′ formula) are of different lengths. In some embodiments, the 5′wing region of the gapmer (X in the 5′-X-Y-Z-3′ formula) is longer than the 3′wing region of the gapmer (Z in the 5′-X-Y-Z-3′ formula). In some embodiments, the 5′wing region of the gapmer (X in the 5′-X-Y-Z-3′ formula) is shorter than the 3′wing region of the gapmer (Z in the 5′-X-Y-Z-3′ formula).

[0602] In some embodiments, a gapmer comprises a 5′-X-Y-Z-3′ of 5-10-5, 4-12-4, 3-14-3, 2-16-2, 1-18-1, 3-10-3, 2-10-2, 1-10-1, 2-8-2, 4-6-4, 3-6-3, 2-6-2, 4-7-4, 3-7-3, 2-7-2, 4-8-4, 3-8-3, 2-8-2, 1-8-1, 2-9-2, 1-9-1, 2-10-2, 1-10-1, 1-12-1, 1-16-1, 2-15-1, 1-15-2, 1-14-3, 3-14-1, 2-14-2, 1-13-4, 4-13-1, 2-13-3, 3-13-2, 1-12-5, 5-12-1, 2-12-4, 4-12-2, 3-12-3, 1-11-6, 6-11-1, 2-11-5, 5-11-2, 3-11-4, 4-11-3, 1-17-1, 2-16-1, 1-16-2, 1-15-3, 3-15-1, 2-15-2, 1-14-4, 4-14-1, 2-14-3, 3-14-2, 1-13-5, 5-13-1, 2-13-4, 4-13-2, 3-13-3, 1-12-6, 6-12-1, 2-12-5, 5-12-2, 3-12-4, 4-12-3, 1-11-7, 7-11-1, 2-11-6, 6-11-2, 3-11-5, 5-11-3, 4-11-4, 1-18-1, 1-17-2, 2-17-1, 1-16-3, 1-16-3, 2-16-2, 1-15-4, 4-15-1, 2-15-3, 3-15-2, 1-14-5, 5-14-1, 2-14-4, 4-14-2, 3-14-3, 1-13-6, 6-13-1, 2-13-5, 5-13-2, 3-13-4, 4-13-3, 1-12-7, 7-12-1, 2-12-6, 6-12-2, 3-12-5, 5-12-3, 1-11-8, 8-11-1, 2-11-7, 7-11-2, 3-11-6, 6-11-3, 4-11-5, 5-11-4, 1-18-1, 1-17-2, 2-17-1, 1-16-3, 3-16-1, 2-16-2, 1-15-4, 4-15-1, 2-15-3, 3-15-2, 1-14-5, 2-14-4, 4-14-2, 3-14-3, 1-13-6, 6-13-1, 2-13-5, 5-13-2, 3-13-4, 4-13-3, 1-12-7, 7-12-1, 2-12-6, 6-12-2, 3-12-5, 5-12-3, 1-11-8, 8-11-1, 2-11-7, 7-11-2, 3-11-6, 6-11-3, 4-11-5, 5-11-4, 1-19-1, 1-18-2, 2-18-1, 1-17-3, 3-17-1, 2-17-2, 1-16-4, 4-16-1, 2-16-3, 3-16-2, 1-15-5, 2-15-4, 4-15-2, 3-15-3, 1-14-6, 6-14-1, 2-14-5, 5-14-2, 3-14-4, 4-14-3, 1-13-7, 7-13-1, 2-13-6, 6-13-2, 3-13-5, 5-13-3, 4-13-4, 1-12-8, 8-12-1, 2-12-7, 7-12-2, 3-12-6, 6-12-3, 4-12-5, 5-12-4, 2-11-8, 8-11-2, 3-11-7, 7-11-3, 4-11-6, 6-11-4, 5-11-5, 1-20-1, 1-19-2, 2-19-1, 1-18-3, 3-18-1, 2-18-2, 1-17-4, 4-17-1, 2-17-3, 3-17-2, 1-16-5, 2-16-4, 4-16-2, 3-16-3, 1-15-6, 6-15-1, 2-15-5, 5-15-2, 3-15-4, 4-15-3, 1-14-7, 7-14-1, 2-14-6, 6-14-2, 3-14-5, 5-14-3, 4-14-4, 1-13-8, 8-13-1, 2-13-7, 7-13-2, 3-13-6, 6-13-3, 4-13-5, 5-13-4, 2-12-8, 8-12-2, 3-12-7, 7-12-3, 4-12-6, 6-12-4, 5-12-5, 3-11-8, 8-11-3, 4-11-7, 7-11-4, 5-11-6, 6-11-5, 1-21-1, 1-20-2, 2-20-1, 1-20-3, 3-19-1, 2-19-2, 1-18-4, 4-18-1, 2-18-3, 3-18-2, 1-17-5, 2-17-4, 4-17-2, 3-17-3, 1-16-6, 6-16-1, 2-16-5, 5-16-2, 3-16-4, 4-16-3, 1-15-7, 7-15-1, 2-15-6, 6-15-2, 3-15-5, 5-15-3, 4-15-4, 1-14-8, 8-14-1, 2-14-7, 7-14-2, 3-14-6, 6-14-3, 4-14-5, 5-14-4, 2-13-8, 8-13-2, 3-13-7, 7-13-3, 4-13-6, 6-13-4, 5-13-5, 1-12-10, 10-12-1, 2-12-9, 9-12-2, 3-12-8, 8-12-3, 4-12-7, 7-12-4, 5-12-6, 6-12-5, 4-11-8, 8-11-4, 5-11-7, 7-11-5, 6-11-6, 1-22-1, 1-21-2, 2-21-1, 1-21-3, 3-20-1, 2-20-2, 1-19-4, 4-19-1, 2-19-3, 3-19-2, 1-18-5, 2-18-4, 4-18-2, 3-18-3, 1-17-6, 6-17-1, 2-17-5, 5-17-2, 3-17-4, 4-17-3, 1-16-7, 7-16-1, 2-16-6, 6-16-2, 3-16-5, 5-16-3, 4-16-4, 1-15-8, 8-15-1, 2-15-7, 7-15-2, 3-15-6, 6-15-3, 4-15-5, 5-15-4, 2-14-8, 8-14-2, 3-14-7, 7-14-3, 4-14-6, 6-14-4, 5-14-5, 3-13-8, 8-13-3, 4-13-7, 7-13-4, 5-13-6, 6-13-5, 4-12-8, 8-12-4, 5-12-7, 7-12-5, 6-12-6, 5-11-8, 8-11-5, 6-11-7, or 7-11-6. The numbers indicate the number of nucleosides in X, Y, and Z regions in the 5′-X-Y-Z-3′ gapmer.

[0603] In some embodiments, one or more nucleosides in the 5′wing region of a gapmer (X in the 5′-X-Y-Z-3′ formula) or the 3′wing region of a gapmer (Z in the 5′-X-Y-Z-3′ formula) are modified nucleotides (e.g., high-affinity modified nucleosides). In some embodiments, the modified nuclsoside (e.g., high-affinity modified nucleosides) is a 2′-modifeid nucleoside. In some embodiments, the 2′-modified nucleoside is a 2′-4′ bicyclic nucleoside or a non-bicyclic 2′-modified nucleoside. In some embodiments, the high-affinity modified nucleoside is a 2′-4′ bicyclic nucleoside (e.g., LNA, cEt, or ENA) or a non-bicyclic 2′-modified nucleoside (e.g., 2′-fluoro (2′-F), 2′-O-methyl (2′-O-Me), 2′-O-methoxyethyl (2′-MOE), 2′-O-aminopropyl (2′-O-AP), 2′-O-dimethylaminoethyl (2′-O-DMAOE), 2′-O-dimethylaminopropyl (2′-O-DMAP), 2′-O-dimethylaminoethyloxyethyl (2′-O-DMAEOE), or 2′-O-N-methylacetamido (2′-O-NMA)).

[0604] In some embodiments, one or more nucleosides in the 5′wing region of a gapmer (X in the 5′-X-Y-Z-3′ formula) are high-affinity modified nucleosides. In some embodiments, each nucleoside in the 5′wing region of the gapmer (X in the 5′-X-Y-Z-3′ formula) is a high-affinity modified nucleoside. In some embodiments, one or more nucleosides in the 3′wing region of a gapmer (Z in the 5′-X-Y-Z-3′ formula) are high-affinity modified nucleosides. In some embodiments, each nucleoside in the 3′wing region of the gapmer (Z in the 5′-X-Y-Z-3′ formula) is a high-affinity modified nucleoside. In some embodiments, one or more nucleosides in the 5′wing region of the gapmer (X in the 5′-X-Y-Z-3′ formula) are high-affinity modified nucleosides and one or more nucleosides in the 3′wing region of the gapmer (Z in the 5′-X-Y-Z-3′ formula) are high-affinity modified nucleosides. In some embodiments, each nucleoside in the 5′wing region of the gapmer (X in the 5′-X-Y-Z-3′ formula) is a high-affinity modified nucleoside and each nucleoside in the 3′wing region of the gapmer (Z in the 5′-X-Y-Z-3′ formula) is high-affinity modified nucleoside.

[0605] In some embodiments, the 5′wing region of a gapmer (X in the 5′-X-Y-Z-3′ formula) comprises the same high affinity nucleosides as the 3′wing region of the gapmer (Z in the 5′-X-Y-Z-3′ formula). For example, the 5′wing region of the gapmer (X in the 5′-X-Y-Z-3′ formula) and the 3′wing region of the gapmer (Z in the 5′-X-Y-Z-3′ formula) may comprise one or more non-bicyclic 2′-modified nucleosides (e.g., 2′-MOE or 2′-O-Me). In another example, the 5′wing region of the gapmer (X in the 5′-X-Y-Z-3′ formula) and the 3′wing region of the gapmer (Z in the 5′-X-Y-Z-3′ formula) may comprise one or more 2′-4′ bicyclic nucleosides (e.g., LNA or cEt). In some embodiments, each nucleoside in the 5′wing region of the gapmer (X in the 5′-X-Y-Z-3′ formula) and the 3′wing region of the gapmer (Z in the 5′-X-Y-Z-3′ formula) is a non-bicyclic 2′-modified nucleosides (e.g., 2′-MOE or 2′-O-Me). In some embodiments, each nucleoside in the 5′wing region of the gapmer (X in the 5′-X-Y-Z-3′ formula) and the 3′wing region of the gapmer (Z in the 5′-X-Y-Z-3′ formula) is a 2′-4′ bicyclic nucleosides (e.g., LNA or cEt).

[0606] In some embodiments, a gapmer comprises a 5′-X-Y-Z-3′ configuration, wherein X and Z is independently 1-7 (e.g., 1, 2, 3, 4, 5, 6, or 7) nucleosides in length and Y is 6-10 (e.g., 6, 7, 8, 9, or 10) nucleosides in length, wherein each nucleoside in X and Z is a non-bicyclic 2′-modified nucleosides (e.g., 2′-MOE or 2′-O-Me) and each nucleoside in Y is a 2′-deoxyribonucleoside. In some embodiments, the gapmer comprises a 5′-X-Y-Z-3′ configuration, wherein X and Z is independently 1-7 (e.g., 1, 2, 3, 4, 5, 6, or 7) nucleosides in length and Y is 6-10 (e.g., 6, 7, 8, 9, or 10) nucleosides in length, wherein each nucleoside in X and Z is a 2′-4′ bicyclic nucleosides (e.g., LNA or cEt) and each nucleoside in Y is a 2′-deoxyribonucleoside. In some embodiments, the 5′wing region of the gapmer (X in the 5′-X-Y-Z-3′ formula) comprises different high affinity nucleosides as the 3′wing region of the gapmer (Z in the 5′-X-Y-Z-3′ formula). For example, the 5′wing region of the gapmer (X in the 5′-X-Y-Z-3′ formula) may comprise one or more non-bicyclic 2′-modified nucleosides (e.g., 2′-MOE or 2′-O-Me) and the 3′wing region of the gapmer (Z in the 5′-X-Y-Z-3′ formula) may comprise one or more 2′-4′ bicyclic nucleosides (e.g., LNA or cEt). In another example, the 3′wing region of the gapmer (Z in the 5′-X-Y-Z-3′ formula) may comprise one or more non-bicyclic 2′-modified nucleosides (e.g., 2′-MOE or 2′-O-Me) and the 5′wing region of the gapmer (X in the 5′-X-Y-Z-3′ formula) may comprise one or more 2′-4′ bicyclic nucleosides (e.g., LNA or cEt).

[0607] In some embodiments, a gapmer comprises a 5′-X-Y-Z-3′ configuration, wherein X and Z is independently 1-7 (e.g., 1, 2, 3, 4, 5, 6, or 7) nucleosides in length and Y is 6-10 (e.g., 6, 7, 8, 9, or 10) nucleosides in length, wherein each nucleoside in X is a non-bicyclic 2′-modified nucleosides (e.g., 2′-MOE or 2′-O-Me), each nucleoside in Z is a 2′-4′ bicyclic nucleosides (e.g., LNA or cEt), and each nucleoside in Y is a 2′-deoxyribonucleoside. In some embodiments, the gapmer comprises a 5′-X-Y-Z-3′ configuration, wherein X and Z is independently 1-7 (e.g., 1, 2, 3, 4, 5, 6, or 7) nucleosides in length and Y is 6-10 (e.g., 6, 7, 8, 9, or 10) nucleosides in length, wherein each nucleoside in X is a 2′-4′ bicyclic nucleosides (e.g., LNA or cEt), each nucleoside in Z is a non-bicyclic 2′-modified nucleosides (e.g., 2′-MOE or 2′-O-Me) and each nucleoside in Y is a 2′-deoxyribonucleoside.

[0608] In some embodiments, the 5′wing region of a gapmer (X in the 5′-X-Y-Z-3′ formula) comprises one or more non-bicyclic 2′-modified nucleosides (e.g., 2′-MOE or 2′ -0-Me) and one or more 2′-4′ bicyclic nucleosides (e.g., LNA or cEt). In some embodiments, the 3′wing region of the gapmer (Z in the 5′-X-Y-Z-3′ formula) comprises one or more non-bicyclic 2′-modified nucleosides (e.g., 2′-MOE or 2′-O-Me) and one or more 2′-4′ bicyclic nucleosides (e.g., LNA or cEt). In some embodiments, both the 5′wing region of the gapmer (X in the 5′-X-Y-Z-3′ formula) and the 3′wing region of the gapmer (Z in the 5′-X-Y-Z-3′ formula) comprise one or more non-bicyclic 2′-modified nucleosides (e.g., 2′-MOE or 2′ -0-Me) and one or more 2′-4′ bicyclic nucleosides (e.g., LNA or cEt).

[0609] In some embodiments, a gapmer comprises a 5′-X-Y-Z-3′ configuration, wherein X and Z is independently 2-7 (e.g., 2, 3, 4, 5, 6, or 7) nucleosides in length and Y is 6-10 (e.g., 6, 7, 8, 9, or 10) nucleosides in length, wherein at least one but not all (e.g., 1, 2, 3, 4, 5, or 6) of positions 1, 2, 3, 4, 5, 6, or 7 in X (the 5′ most position is position 1) is a non-bicyclic 2′-modified nucleoside (e.g., 2′-MOE or 2′-O-Me), wherein the rest of the nucleosides in both X and Z are 2′-4′ bicyclic nucleosides (e.g., LNA or cEt), and wherein each nucleoside in Y is a 2′deoxyribonucleoside. In some embodiments, the gapmer comprises a 5′-X-Y-Z-3′ configuration, wherein X and Z is independently 2-7 (e.g., 2, 3, 4, 5, 6, or 7) nucleosides in length and Y is 6-10 (e.g., 6, 7, 8, 9, or 10) nucleosides in length, wherein at least one but not all (e.g., 1, 2, 3, 4, 5, or 6) of positions 1, 2, 3, 4, 5, 6, or 7 in Z (the 5′ most position is position 1) is a non-bicyclic 2′-modified nucleoside (e.g., 2′-MOE or 2′-O-Me), wherein the rest of the nucleosides in both X and Z are 2′-4′ bicyclic nucleosides (e.g., LNA or cEt), and wherein each nucleoside in Y is a 2′deoxyribonucleoside. In some embodiments, the gapmer comprises a 5′-X-Y-Z-3′ configuration, wherein X and Z is independently 2-7 (e.g., 2, 3, 4, 5, 6, or 7) nucleosides in length and Y is 6-10 (e.g., 6, 7, 8, 9, or 10) nucleosides in length, wherein at least one but not all (e.g., 1, 2, 3, 4, 5, or 6) of positions 1, 2, 3, 4, 5, 6, or 7 in X and at least one of positions but not all (e.g., 1, 2, 3, 4, 5, or 6) 1, 2, 3, 4, 5, 6, or 7 in Z (the 5′ most position is position 1) is a non-bicyclic 2′-modified nucleoside (e.g., 2′-MOE or 2′-O-Me), wherein the rest of the nucleosides in both X and Z are 2′-4′ bicyclic nucleosides (e.g., LNA or cEt), and wherein each nucleoside in Y is a 2′deoxyribonucleoside.

[0610] Non-limiting examples of gapmers configurations with a mix of non-bicyclic 2′-modified nucleoside (e.g., 2′-MOE or 2′-O-Me) and 2′-4′ bicyclic nucleosides (e.g., LNA or cEt) in the 5′wing region of the gapmer (X in the 5′-X-Y-Z-3′ formula) and/or the 3′wing region of the gapmer (Z in the 5′-X-Y-Z-3′ formula) include: BBB-(D)n-BBBAA; KKK-(D)n-KKKAA; LLL-(D)n-LLLAA; BBB-(D)n-BBBEE; KKK-(D)n-KKKEE; LLL-(D)n-LLLEE; BBB-(D)n-BBBAA; KKK-(D)n-KKKAA; LLL-(D)n-LLLAA; BBB-(D)n-BBBEE; KKK-(D)n-KKKEE; LLL-(D)n-LLLEE; BBB-(D)n-BBBAAA; KKK-(D)n-KKKAAA; LLL-(D)n-LLLAAA; BBB-(D)n-BBBEEE; KKK-(D)n-KKKEEE; LLL-(D)n-LLLEEE; BBB-(D)n-BBBAAA; KKK-(D)n-KKKAAA; LLL-(D)n-LLLAAA; BBB-(D)n-BBBEEE; KKK-(D)n-KKKEEE; LLL-(D)n-LLLEEE; BABA-(D)n-ABAB; KAKA-(D)n-AKAK; LALA-(D)n-ALAL; BEBE-(D)n-EBEB; KEKE-(D)n-EKEK; LELE-(D)n-ELEL; BABA-(D)n-ABAB; KAKA-(D)n-AKAK; LALA-(D)n-ALAL; BEBE-(D)n-EBEB; KEKE-(D)n-EKEK; LELE-(D)n-ELEL; ABAB-(D)n-ABAB; AKAK-(D)n-AKAK; ALAL-(D)n-ALAL; EBEB-(D)n-EBEB; EKEK-(D)n-EKEK; ELEL-(D)n-ELEL; ABAB-(D)n-ABAB; AKAK-(D)n-AKAK; ALAL-(D)n-ALAL; EBEB-(D)n-EBEB; EKEK-(D)n-EKEK; ELEL-(D)n-ELEL; AABB-(D)n-BBAA; BBAA-(D)n-AABB; AAKK-(D)n-KKAA; AALL-(D)n-LLAA; EEBB-(D)n-BBEE; EEKK-(D)n-KKEE; EELL-(D)n-LLEE; AABB-(D)n-BBAA; AAKK-(D)n-KKAA; AALL-(D)n-LLAA; EEBB-(D)n-BBEE; EEKK-(D)n-KKEE; EELL-(D)n-LLEE; BBB-(D)n-BBA; KKK-(D)n-KKA; LLL-(D)n-LLA; BBB-(D)n-BBE; KKK-(D)n-KKE; LLL-(D)n-LLE; BBB-(D)n-BBA; KKK-(D)n-KKA; LLL-(D)n-LLA; BBB-(D)n-BBE; KKK-(D)n-KKE; LLL-(D)n-LLE; BBB-(D)n-BBA; KKK-(D)n-KKA; LLL-(D)n-LLA; BBB-(D)n-BBE; KKK-(D)n-KKE; LLL-(D)n-LLE; ABBB-(D)n-BBBA; AKKK-(D)n-KKKA; ALLL-(D)n-LLLA; EBBB-(D)n-BBBE; EKKK-(D)n-KKKE; ELLL-(D)n-LLLE; ABBB-(D)n-BBBA; AKKK-(D)n-KKKA; ALLL-(D)n-LLLA; EBBB-(D)n-BBBE; EKKK-(D)n-KKKE; ELLL-(D)n-LLLE; ABBB-(D)n-BBBAA; AKKK-(D)n-KKKAA; ALLL-(D)n-LLLAA; EBBB-(D)n-BBBEE; EKKK-(D)n-KKKEE; ELLL-(D)n-LLLEE; ABBB-(D)n-BBBAA; AKKK-(D)n-KKKAA; ALLL-(D)n-LLLAA; EBBB-(D)n-BBBEE; EKKK-(D)n-KKKEE; ELLL-(D)n-LLLEE; AABBB-(D)n-BBB; AAKKK-(D)n-KKK; AALLL-(D)n-LLL; EEBBB-(D)n-BBB; EEKKK-(D)n-KKK; EELLL-(D)n-LLL; AABBB-(D)n-BBB; AAKKK-(D)n-KKK; AALLL-(D)n-LLL; EEBBB-(D)n-BBB; EEKKK-(D)n-KKK; EELLL-(D)n-LLL; AABBB-(D)n-BBBA; AAKKK-(D)n-KKKA; AALLL-(D)n-LLLA; EEBBB-(D)n-BBBE; EEKKK-(D)n-KKKE; EELLL-(D)n-LLLE; AABBB-(D)n-BBBA; AAKKK-(D)n-KKKA; AALLL-(D)n-LLLA; EEBBB-(D)n-BBBE; EEKKK-(D)n-KKKE; EELLL-(D)n-LLLE; ABBAABB-(D)n-BB; AKKAAKK-(D)n-KK; ALLAALLL-(D)n-LL; EBBEEBB-(D)n-BB; EKKEEKK-(D)n-KK; ELLEELL-(D)n-LL; ABBAABB-(D)n-BB; AKKAAKK-(D)n-KK; ALLAALL-(D)n-LL; EBBEEBB-(D)n-BB; EKKEEKK-(D)n-KK; ELLEELL-(D)n-LL; ABBABB-(D)n-BBB; AKKAKK-(D)n-KKK; ALLALLL-(D)n-LLL; EBBEBB-(D)n-BBB; EKKEKK-(D)n-KKK; ELLELL-(D)n-LLL; ABBABB-(D)n-BBB; AKKAKK-(D)n-KKK; ALLALL-(D)n-LLL; EBBEBB-(D)n-BBB; EKKEKK-(D)n-KKK; ELLELL-(D)n-LLL; EEEK-(D)n-EEEEEEEE; EEK-(D)n-EEEEEEEEE; EK-(D)n-EEEEEEEEEE; EK-(D)n-EEEKK; K-(D)n-EEEKEKE; K-(D)n-EEEKEKEE; K-(D)n-EEKEK; EK-(D)n-EEEEKEKE; EK-(D)n-EEEKEK; EEK-(D)n-KEEKE; EK-(D)n-EEKEK; EK-(D)n-KEEK; EEK-(D)n-EEEKEK; EK-(D)n-KEEEKEE; EK-(D)n-EEKEKE; EK-(D)n-EEEKEKE; and EK-(D)n-EEEEKEK;. “A” nucleosides comprise a 2′-modified nucleoside; “B” represents a 2′-4′ bicyclic nucleoside; “K” represents a constrained ethyl nucleoside (cEt); “L” represents an LNA nucleoside; and “E” represents a 2′-MOE modified ribonucleoside; “D” represents a 2′-deoxyribonucleoside; “n” represents the length of the gap segment (Y in the 5′-X-Y-Z-3′ configuration) and is an integer between 1-20.

[0611] In some embodiments, any one of the gapmers described herein comprises one or more modified nucleoside linkages (e.g., a phosphorothioate linkage) in each of the X, Y, and Z regions. In some embodiments, each internucleoside linkage in the any one of the gapmers described herein is a phosphorothioate linkage. In some embodiments, each of the X, Y, and Z regions independently comprises a mix of phosphorothioate linkages and phosphodiester linkages. In some embodiments, each internucleoside linkage in the gap region Y is a phosphorothioate linkage, the 5′wing region X comprises a mix of phosphorothioate linkages and phosphodiester linkages, and the 3′wing region Z comprises a mix of phosphorothioate linkages and phosphodiester linkages.

### i. Mixmers

[0612] In some embodiments, an oligonucleotide described herein may be a mixmer or comprise a mixmer sequence pattern. In general, mixmers are oligonucleotides that comprise both naturally and non-naturally occurring nucleosides or comprise two different types of non-naturally occurring nucleosides typically in an alternating pattern. Mixmers generally have higher binding affinity than unmodified oligonucleotides and may be used to specifically bind a target molecule, e.g., to block a binding site on the target molecule. Generally, mixmers do not recruit an RNase to the target molecule and thus do not promote cleavage of the target molecule. Such oligonucleotides that are incapable of recruiting RNase H have been described, for example, see WO2007/112754 or WO2007/112753.

[0613] In some embodiments, the mixmer comprises or consists of a repeating pattern of nucleoside analogues and naturally occurring nucleosides, or one type of nucleoside analogue and a second type of nucleoside analogue. However, a mixmer need not comprise a repeating pattern and may instead comprise any arrangement of modified nucleoside s and naturally occurring nucleoside s or any arrangement of one type of modified nucleoside and a second type of modified nucleoside. The repeating pattern, may, for instance be every second or every third nucleoside is a modified nucleoside, such as LNA, and the remaining nucleoside s are naturally occurring nucleosides, such as DNA, or are a 2′ substituted nucleoside analogue such as 2′-MOE or 2′ fluoro analogues, or any other modified nucleoside described herein. It is recognized that the repeating pattern of modified nucleoside, such as LNA units, may be combined with modified nucleoside at fixed positions-e.g. at the 5′ or 3′ termini.

[0614] In some embodiments, a mixmer does not comprise a region of more than 5, more than 4, more than 3, or more than 2 consecutive naturally occurring nucleosides, such as DNA nucleosides. In some embodiments, the mixmer comprises at least a region consisting of at least two consecutive modified nucleoside, such as at least two consecutive LNAs. In some embodiments, the mixmer comprises at least a region consisting of at least three consecutive modified nucleoside units, such as at least three consecutive LNAs.

[0615] In some embodiments, the mixmer does not comprise a region of more than 7, more than 6, more than 5, more than 4, more than 3, or more than 2 consecutive nucleoside analogues, such as LNAs. In some embodiments, LNA units may be replaced with other nucleoside analogues, such as those referred to herein.

[0616] Mixmers may be designed to comprise a mixture of affinity enhancing modified nucleosides, such as in non-limiting example LNA nucleosides and 2′-O-Me nucleosides. In some embodiments, a mixmer comprises modified internucleoside linkages (e.g., phosphorothioate internucleoside linkages or other linkages) between at least two, at least three, at least four, at least five or more nucleosides.

[0617] A mixmer may be produced using any suitable method. Representative U.S. Pat., U.S. Pat. publications, and PCT publications that teach the preparation of mixmers include U.S. Pat. Publication Nos. US20060128646, US20090209748, US20090298916, US20110077288, and US20120322851, and U.S. Pat. No. 7687617.

[0618] In some embodiments, a mixmer comprises one or more morpholino nucleosides. For example, in some embodiments, a mixmer may comprise morpholino nucleosides mixed (e.g., in an alternating manner) with one or more other nucleosides (e.g., DNA, RNA nucleosides) or modified nucleosides (e.g., LNA, 2′-O-Me nucleosides).

[0619] In some embodiments, mixmers are useful for splice correcting or exon skipping, for example, as reported in Touznik A., et al., LNA/DNA mixmer-based antisense oligonucleotides correct alternative splicing of the SMN2 gene and restore SMN protein expression in type 1 SMA fibroblasts Scientific Reports, volume 7, Article number: 3672 (2017), Chen S. et al., Synthesis of a Morpholino Nucleic Acid (MNA)-Uridine Phosphoramidite, and Exon Skipping Using MNA/2′-0-Methyl Mixmer Antisense Oligonucleotide, Molecules 2016, 21, 1582, the contents of each which are incorporated herein by reference.

### j. RNA Interference (RNAi)

[0620] In some embodiments, oligonucleotides provided herein may be in the form of small interfering RNAs (siRNA), also known as short interfering RNA or silencing RNA. SiRNA, is a class of double-stranded RNA molecules, typically about 20-25 base pairs in length that target nucleic acids (e.g., mRNAs) for degradation via the RNA interference (RNAi) pathway in cells. Specificity of siRNA molecules may be determined by the binding of the antisense strand of the molecule to its target RNA. Effective siRNA molecules are generally less than 30 to 35 base pairs in length to prevent the triggering of non-specific RNA interference pathways in the cell via the interferon response, although longer siRNA can also be effective. In some embodiments, the siRNA molecules are 7, 8, 9, 10, 11, 12, 13, 14, 15, 16, 17, 18, 19, 20, 21, 22, 23, 24, 25, 26, 27, 28, 29, 30, 35, 40, 45, 50, or more base pairs in length. In some embodiments, the siRNA molecules are 8 to 30 base pairs in length, 10 to 15 base pairs in length, 10 to 20 base pairs in length, 15 to 25 base pairs in length, 19 to 21 base pairs in length, 21 to 23 base pairs in length.

[0621] Following selection of an appropriate target RNA sequence, siRNA molecules that comprise a nucleotide sequence complementary to all or a portion of the target sequence, i.e. an antisense sequence, can be designed and prepared using appropriate methods (see, e.g., PCT Publication Number WO 2004/016735; and U.S. Pat. Publication Nos. 2004/0077574 and 2008/0081791). The siRNA molecule can be double stranded (i.e. a dsRNA molecule comprising an antisense strand and a complementary sense strand strand that hybridizes to form the dsRNA) or single-stranded (i.e. a ssRNA molecule comprising just an antisense strand). The siRNA molecules can comprise a duplex, asymmetric duplex, hairpin or asymmetric hairpin secondary structure, having self-complementary sense and antisense strands.

[0622] In some embodiments, the antisense strand of the siRNA molecule is 7, 8, 9, 10, 11, 12, 13, 14, 15, 16, 17, 18, 19, 20, 21, 22, 23, 24, 25, 26, 27, 28, 29, 30, 35, 40, 45, 50, or more nucleotides in length. In some embodiments, the antisense strand is 8 to 50 nucleotides in length, 8 to 40 nucleotides in length, 8 to 30 nucleotides in length, 10 to 15 nucleotides in length, 10 to 20 nucleotides in length, 15 to 25 nucleotides in length, 19 to 21 nucleotides in length, 21 to 23 nucleotides in lengths.

[0623] In some embodiments, the sense strand of the siRNA molecule is 7, 8, 9, 10, 11, 12, 13, 14, 15, 16, 17, 18, 19, 20, 21, 22, 23, 24, 25, 26, 27, 28, 29, 30, 35, 40, 45, 50, or more nucleotides in length. In some embodiments, the sense strand is 8 to 50 nucleotides in length, 8 to 40 nucleotides in length, 8 to 30 nucleotides in length, 10 to 15 nucleotides in length, 10 to 20 nucleotides in length, 15 to 25 nucleotides in length, 19 to 21 nucleotides in length, 21 to 23 nucleotides in lengths.

[0624] In some embodiments, siRNA molecules comprise an antisense strand comprising a region of complementarity to a target region in a target mRNA. In some embodiments, the region of complementarity is at least 80%, at least 85%, at least 90%, at least 91%, at least 92%, at least 93%, at least 94%, at least 95%, at least 96%, at least 97%, at least 98%, at least 99% or 100% complementary to a target region in a target mRNA. In some embodiments, the target region is a region of consecutive nucleotides in the target mRNA. In some embodiments, a complementary nucleotide sequence need not be 100% complementary to that of its target to be specifically hybridizable or specific for a target RNA sequence.

[0625] In some embodiments, siRNA molecules comprise an antisense strand that comprises a region of complementarity to a target RNA sequence and the region of complementarity is in the range of 8 to 15, 8 to 30, 8 to 40, or 10 to 50, or 5 to 50, or 5 to 40 nucleotides in length. In some embodiments, a region of complementarity is 5, 6, 7, 8, 9, 10, 11, 12, 13, 14, 15, 16, 17, 18, 19, 20, 21, 22, 23, 24, 25, 26, 27, 28, 29, 30, 31, 32, 33, 34, 35, 36, 37, 38, 39, 40, 41, 42, 43, 44, 45, 46, 47, 48, 49, or 50 nucleotides in length. In some embodiments, the region of complementarity is complementary with at least 6, at least 7, at least 8, at least 9, at least 10, at least 11, at least 12, at least 13, at least 14, at least 15, at least 16, at least 17, at least 18, at least 19, at least 20, at least 21, at least 22, at least 23, at least 24, at least 25 or more consecutive nucleotides of a target RNA sequence. In some embodiments, siRNA molecules comprise a nucleotide sequence that contains no more than 1, 2, 3, 4, or 5 base mismatches compared to the portion of the consecutive nucleotides of target RNA sequence. In some embodiments, siRNA molecules comprise a nucleotide sequence that has up to 3 mismatches over 15 bases, or up to 2 mismatches over 10 bases.

[0626] In some embodiments, siRNA molecules comprise an antisense strand comprising a nucleotide sequence that is complementary (e.g., at least 85%, at least 90%, at least 95%, or 100%) to the target RNA sequence of the oligonculeotides provided herein. In some embodiments, siRNA molecules comprise an antisense strand comprising a nucleotide sequence that is at least 85%, at least 90%, at least 95%, or 100% identical to the oligonucleotides provided herein. In some embodiments, siRNA molecules comprise an antisense strand comprising at least 6, at least 7, at least 8, at least 9, at least 10, at least 11, at least 12, at least 13, at least 14, at least 15, at least 16, at least 17, at least 18, at least 19, at least 20, at least 21, at least 22, at least 23, at least 24, at least 25 or more consecutive nucleotides of the oligonucleotides provided herein.

[0627] Double-stranded siRNA may comprise sense and anti-sense RNA strands that are the same length or different lengths. Double-stranded siRNA molecules can also be assembled from a single oligonucleotide in a stem-loop structure, wherein self-complementary sense and antisense regions of the siRNA molecule are linked by means of a nucleic acid based or non-nucleic acid-based linker(s), as well as circular single-stranded RNA having two or more loop structures and a stem comprising self-complementary sense and antisense strands, wherein the circular RNA can be processed either in vivo or in vitro to generate an active siRNA molecule capable of mediating RNAi. Small hairpin RNA (shRNA) molecules thus are also contemplated herein. These molecules comprise a specific antisense sequence in addition to the reverse complement (sense) sequence, typically separated by a spacer or loop sequence. Cleavage of the spacer or loop provides a single-stranded RNA molecule and its reverse complement, such that they may anneal to form a dsRNA molecule (optionally with additional processing steps that may result in addition or removal of one, two, three or more nucleotides from the 3′ end and/or (e.g., and) the 5′ end of either or both strands). A spacer can be of a sufficient length to permit the antisense and sense sequences to anneal and form a double-stranded structure (or stem) prior to cleavage of the spacer (and, optionally, subsequent processing steps that may result in addition or removal of one, two, three, four, or more nucleotides from the 3′ end and/or (e.g., and) the 5′ end of either or both strands). A spacer sequence is may be an unrelated nucleotide sequence that is situated between two complementary nucleotide sequence regions which, when annealed into a double-stranded nucleic acid, comprise a shRNA.

[0628] The overall length of the siRNA molecules can vary from about 14 to about 100 nucleotides depending on the type of siRNA molecule being designed. Generally between about 14 and about 50 of these nucleotides are complementary to the RNA target sequence, i.e. constitute the specific antisense sequence of the siRNA molecule. For example, when the siRNA is a double- or single-stranded siRNA, the length can vary from about 14 to about 50 nucleotides, whereas when the siRNA is a shRNA or circular molecule, the length can vary from about 40 nucleotides to about 100 nucleotides.

[0629] An siRNA molecule may comprise a 3′ overhang at one end of the molecule, The other end may be blunt-ended or have also an overhang (5′ or 3′). When the siRNA molecule comprises an overhang at both ends of the molecule, the length of the overhangs may be the same or different. In one embodiment, the siRNA molecule of the present disclosure comprises 3′ overhangs of about 1 to about 3 nucleotides on both ends of the molecule. In some embodiments, the siRNA molecule comprises 3′ overhangs of about 1 to about 3 nucleotides on the sense strand. In some embodiments, the siRNA molecule comprises 3′ overhangs of about 1 to about 3 nucleotides on the antisense strand. In some embodiments, the siRNA molecule comprises 3′ overhangs of about 1 to about 3 nucleotides on both the sense strand and the antisense strand.

[0630] In some embodiments, the siRNA molecule comprises one or more modified nucleotides (e.g. 1, 2, 3, 4, 5, 6, 7, 8, 9, 10 or more). In some embodiments, the siRNA molecule comprises one or more modified nucleotides and/or (e.g., and) one or more modified internucleotide linkages. In some embodiments, the modified nucleotide is a modified sugar moiety (e.g. a 2′ modified nucleotide). In some embodiments, the siRNA molecule comprises one or more 2′ modified nucleotides, e.g., a 2′-deoxy, 2′-fluoro (2′-F), 2′-O-methyl (2′-O-Me), 2′-O-methoxyethyl (2′-MOE), 2′-O-aminopropyl (2′-O-AP), 2′-O-dimethylaminoethyl (2′-O-DMAOE), 2′-O-dimethylaminopropyl (2′-O-DMAP), 2′-O-dimethylaminoethyloxyethyl (2′-O-DMAEOE), or 2′-O-N-methylacetamido (2′-O--NMA). In some embodiments, each nucleotide of the siRNA molecule is a modified nucleotide (e.g., a 2′-modified nucleotide). In some embodiments, the siRNA molecule comprises one or more phosphorodiamidate morpholinos. In some embodiments, each nucleotide of the siRNA molecule is a phosphorodiamidate morpholino.

[0631] In some embodiments, the siRNA molecule contains a phosphorothioate or other modified internucleotide linkage. In some embodiments, the siRNA molecule comprises phosphorothioate internucleoside linkages. In some embodiments, the siRNA molecule comprises phosphorothioate internucleoside linkages between at least two nucleotides. In some embodiments, the siRNA molecule comprises phosphorothioate internucleoside linkages between all nucleotides. For example, in some embodiments, the siRNA molecule comprises modified internucleotide linkages at the first, second, and/or (e.g., and) third internucleoside linkage at the 5′ or 3′ end of the siRNA molecule.

[0632] In some embodiments, the modified internucleotide linkages are phosphorus-containing linkages. In some embodiments, phosphorus-containing linkages that may be used include, but are not limited to, phosphorothioates, chiral phosphorothioates, phosphorodithioates, phosphotriesters, aminoalkylphosphotriesters, methyl and other alkyl phosphonates comprising 3′alkylene phosphonates and chiral phosphonates, phosphinates, phosphoramidates comprising 3′-amino phosphoramidate and aminoalkylphosphoramidates, thionophosphoramidates, thionoalkylphosphonates, thionoalkylphosphotriesters, and boranophosphates having normal 3′-5′ linkages, 2′-5′ linked analogs of these, and those having inverted polarity wherein the adjacent pairs of nucleoside units are linked 3′-5′ to 5′-3′ or 2′-5′ to 5′-2′; see US Pat. Nos. 3,687,808; 4,469,863; 4,476,301; 5,023,243; 5, 177,196; 5,188,897; 5,264,423; 5,276,019; 5,278,302; 5,286,717; 5,321,131; 5,399,676; 5,405,939; 5,453,496; 5,455, 233; 5,466,677; 5,476,925; 5,519,126; 5,536,821; 5,541,306; 5,550,111; 5,563, 253; 5,571,799; 5,587,361; and 5,625,050.

[0633] Any of the modified chemistries or formats of siRNA molecules described herein can be combined with each other. For example, one, two, three, four, five, or more different types of modifications can be included within the same siRNA molecule.

[0634] In some embodiments, the antisense strand comprises one or more modified nucleotides (e.g. 1, 2, 3, 4, 5, 6, 7, 8, 9, 10 or more). In some embodiments, the antisense strand comprises one or more modified nucleotides and/or (e.g., and) one or more modified internucleotide linkages. In some embodiments, the modified nucleotide comprises a modified sugar moiety (e.g. a 2′ modified nucleotide). In some embodiments, the antisense strand comprises one or more 2′ modified nucleotides, e.g., a 2′-deoxy, 2′-fluoro (2′-F), 2′-O-methyl (2′-O-Me), 2′-O-methoxyethyl (2′-MOE), 2′-O-aminopropyl (2′-O-AP), 2′-O-dimethylaminoethyl (2′-O-DMAOE), 2′-O-dimethylaminopropyl (2′-O-DMAP), 2′-O-dimethylaminoethyloxyethyl (2′-O-DMAEOE), or 2′-O-N-methylacetamido (2′-O--NMA). In some embodiments, each nucleotide of the antisense strand is a modified nucleotide (e.g., a 2′-modified nucleotide). In some embodiments, the antisense strand comprises one or more phosphorodiamidate morpholinos. In some embodiments, the antisense strand is a phosphorodiamidate morpholino oligomer (PMO).

[0635] In some embodiments, antisense strand contains a phosphorothioate or other modified internucleotide linkage. In some embodiments, the antisense strand comprises phosphorothioate internucleoside linkages. In some embodiments, the antisense strand comprises phosphorothioate internucleoside linkages between at least two nucleotides. In some embodiments, the antisense strand comprises phosphorothioate internucleoside linkages between all nucleotides. For example, in some embodiments, the antisense strand comprises modified internucleotide linkages at the first, second, and/or (e.g., and) third internucleoside linkage at the 5′ or 3′ end of the siRNA molecule. In some embodiments, the modified internucleotide linkages are phosphorus-containing linkages. In some embodiments, phosphorus-containing linkages that may be used include, but are not limited to, phosphorothioates, chiral phosphorothioates, phosphorodithioates, phosphotriesters, aminoalkylphosphotriesters, methyl and other alkyl phosphonates comprising 3′alkylene phosphonates and chiral phosphonates, phosphinates, phosphoramidates comprising 3′-amino phosphoramidate and aminoalkylphosphoramidates, thionophosphoramidates, thionoalkylphosphonates, thionoalkylphosphotriesters, and boranophosphates having normal 3′-5′ linkages, 2′-5′ linked analogs of these, and those having inverted polarity wherein the adjacent pairs of nucleoside units are linked 3′-5′ to 5′-3′ or 2′-5′ to 5′-2′; see U.S. Pat. Nos. 3,687,808; 4,469,863; 4,476,301; 5,023,243; 5,177,196; 5,188,897; 5,264,423; 5,276,019; 5,278,302; 5,286,717; 5,321,131; 5,399,676; 5,405,939; 5,453,496; 5,455,233; 5,466,677; 5,476,925; 5,519,126; 5,536,821; 5,541,306; 5,550,111; 5,563,253; 5,571,799; 5,587,361; and 5,625,050.

[0636] Any of the modified chemistries or formats of the antisense strand described herein can be combined with each other. For example, one, two, three, four, five, or more different types of modifications can be included within the same antisense strand.

[0637] In some embodiments, the sense strand comprises one or more modified nucleotides (e.g. 1, 2, 3, 4, 5, 6, 7, 8, 9, 10 or more). In some embodiments, the sense strand comprises one or more modified nucleotides and/or (e.g., and) one or more modified internucleotide linkages. In some embodiments, the modified nucleotide is a modified sugar moiety (e.g. a 2′ modified nucleotide). In some embodiments, the sense strand comprises one or more 2′ modified nucleotides, e.g., a 2′-deoxy, 2′-fluoro (2′-F), 2′-O-methyl (2′-O-Me), 2′-O-methoxyethyl (2′-MOE), 2′-O-aminopropyl (2′-O-AP), 2′-O-dimethylaminoethyl (2′-O-DMAOE), 2′-O-dimethylaminopropyl (2′-O-DMAP), 2′-O-dimethylaminoethyloxyethyl (2′-O-DMAEOE), or 2′-O--N-methylacetamido (2′-O--NMA). In some embodiments, each nucleotide of the sense strand is a modified nucleotide (e.g., a 2′-modified nucleotide). In some embodiments, the sense strand comprises one or more phosphorodiamidate morpholinos. In some embodiments, the antisense strand is a phosphorodiamidate morpholino oligomer (PMO). In some embodiments, the sense strand contains a phosphorothioate or other modified internucleotide linkage. In some embodiments, the sense strand comprises phosphorothioate internucleoside linkages. In some embodiments, the sense strand comprises phosphorothioate internucleoside linkages between at least two nucleotides. In some embodiments, the sense strand comprises phosphorothioate internucleoside linkages between all nucleotides. For example, in some embodiments, the sense strand comprises modified internucleotide linkages at the first, second, and/or (e.g., and) third internucleoside linkage at the 5′ or 3′ end of the sense strand.

[0638] In some embodiments, the modified internucleotide linkages are phosphorus-containing linkages. In some embodiments, phosphorus-containing linkages that may be used include, but are not limited to, phosphorothioates, chiral phosphorothioates, phosphorodithioates, phosphotriesters, aminoalkylphosphotriesters, methyl and other alkyl phosphonates comprising 3′alkylene phosphonates and chiral phosphonates, phosphinates, phosphoramidates comprising 3′-amino phosphoramidate and aminoalkylphosphoramidates, thionophosphoramidates, thionoalkylphosphonates, thionoalkylphosphotriesters, and boranophosphates having normal 3′-5′ linkages, 2′-5′ linked analogs of these, and those having inverted polarity wherein the adjacent pairs of nucleoside units are linked 3′-5′ to 5′-3′ or 2′-5′ to 5′-2′; see U.S. Pat. Nos. 3,687,808; 4,469,863; 4,476,301; 5,023,243; 5,177,196; 5,188,897; 5,264,423; 5,276,019; 5,278,302; 5,286,717; 5,321,131; 5,399,676; 5,405,939; 5,453,496; 5,455,233; 5,466,677; 5,476,925; 5,519,126; 5,536,821; 5,541,306; 5,550,111; 5,563,253; 5,571,799; 5,587,361; and 5,625,050.

[0639] Any of the modified chemistries or formats of the sense strand described herein can be combined with each other. For example, one, two, three, four, five, or more different types of modifications can be included within the same sense strand.

[0640] In some embodiments, the antisense or sense strand of the siRNA molecule comprises modifications that enhance or reduce RNA-induced silencing complex (RISC) loading. In some embodiments, the antisense strand of the siRNA molecule comprises modifications that enhance RISC loading. In some embodiments, the sense strand of the siRNA molecule comprises modifications that reduce RISC loading and reduce off-target effects. In some embodiments, the antisense strand of the siRNA molecule comprises a 2′-O-methoxyethyl (2′-MOE) modification. The addition of the 2′-O-methoxyethyl (2′-MOE) group at the cleavage site improves both the specificity and silencing activity of siRNAs by facilitating the oriented RNA-induced silencing complex (RISC) loading of the modified strand, as described in Song et al., (2017) Mol Ther Nucleic Acids 9:242-250, incorporated herein by reference in its entirety. In some embodiments, the antisense strand of the siRNA molecule comprises a 2′-OMe-phosphorodithioate modification, which increases RISC loading as described in Wu et al., (2014) Nat Commun 5:3459, incorporated herein by reference in its entirety.

[0641] In some embodiments, the sense strand of the siRNA molecule comprises a 5′-morpholino, which reduces RISC loading of the sense strand and improves antisense strand selection and RNAi activity, as described in Kumar et al., (2019) Chem Commun (Camb) 55(35):5139-5142, incorporated herein by reference in its entirety. In some embodiments, the sense strand of the siRNA molecule is modified with a synthetic RNA-like high affinity nucleotide analogue, Locked Nucleic Acid (LNA), which reduces RISC loading of the sense strand and further enhances antisense strand incorporation into RISC, as described in Elman et al., (2005) Nucleic Acids Res. 33(1): 439-447, incorporated herein by reference in its entirety. In some embodiments, the sense strand of the siRNA molecule comprises a 5′ unlocked nucleic acic (UNA) modification, which reduce RISC loading of the sense strand and improve silencing potentcy of the antisense strand, as described in Snead et al., (2013) Mol Ther Nucleic Acids 2(7):e103, incorporated herein by reference in its entirety. In some embodiments, the sense strand of the siRNA molecule comprises a 5-nitroindole modification, which descresed the RNAi potency of the sense strand and reduces off-targent effects as described in Zhang et al., (2012) Chembiochem 13(13):1940-1945, incorporated herein by reference in its entirety. In some embodiments, the sense strand comprises a 2′-O’methyl (2′-O-Me) modification, which reduces RISC loading and the off-target effects of the sense strand, as described in Zheng et al., FASEB (2013) 27(10): 4017-4026, incorporated herein by reference in its entirety. In some embodiments, the sense strand of the siRNA molecule is fully substituted with morpholino, 2′-MOE or 2′-O-Me residues, and are not recognized by RISC as described in Kole et al., (2012) Nature reviews. Drug Discovery 11(2): 125-140, incorporated herein by reference in its entirety. In some embodiments the antisense strand of the siRNA molecule comprises a 2′-MOE modification and the sense strand comprises an 2′-O-Me modification (see e.g., Song et al., (2017) Mol Ther Nucleic Acids 9:242-250).In some embodiments at least one (e.g., at least 2, at least 3, at least 4, at least 5, at least 10) siRNA molecule is linked (e.g., covalently) to a muscle-targeting agent. In some embodiments, the muscle-targeting agent may comprise, or consist of, a nucleic acid (e.g., DNA or RNA), a peptide (e.g., an antibody), a lipid (e.g., a microvesicle), or a sugar moiety (e.g., a polysaccharide). In some embodiments, the muscle-targeting agent is an antibody. In some embodiments, the muscle-targeting agent is an anti-transferrin receptor antibody (e.g., any one of the anti-TfR antibodies provided herein). In some embodiments, the muscle-targeting agent may be linked to the 5′ end of the sense strand of the siRNA molecule. In some embodiments, the muscle-targeting agent may be linked to the 3′ end of the sense strand of the siRNA molecule. In some embodiments, the muscle-targeting agent may be linked internally to the sense strand of the siRNA molecule. In some embodiments, the muscle-targeting agent may be linked to the 5′ end of the antisense strand of the siRNA molecule. In some embodiments, the muscle-targeting agent may be linked to the 3′ end of the antisense strand of the siRNA molecule. In some embodiments, the muscle-targeting agent may be linked internally to the antisense strand of the siRNA molecule.

### k. microRNA (miRNAs)

[0642] In some embodiments, an oligonucleotide may be a microRNA (miRNA). MicroRNAs (referred to as “miRNAs”) are small non-coding RNAs, belonging to a class of regulatory molecules that control gene expression by binding to complementary sites on a target RNA transcript. Typically, miRNAs are generated from large RNA precursors (termed pri-miRNAs) that are processed in the nucleus into approximately 70 nucleotide pre-miRNAs, which fold into imperfect stem-loop structures. These pre-miRNAs typically undergo an additional processing step within the cytoplasm where mature miRNAs of 18-25 nucleotides in length are excised from one side of the pre-miRNA hairpin by an RNase III enzyme, Dicer.

[0643] As used herein, miRNAs including pri-miRNA, pre-miRNA, mature miRNA or fragments of variants thereof that retain the biological activity of mature miRNA. In one embodiment, the size range of the miRNA can be from 21 nucleotides to 170 nucleotides. In one embodiment the size range of the miRNA is from 70 to 170 nucleotides in length. In another embodiment, mature miRNAs of from 21 to 25 nucleotides in length can be used.

### l. Aptamers

[0644] In some embodiments, oligonucleotides provided herein may be in the form of aptamers. Generally, in the context of molecular payloads, aptamer is any nucleic acid that binds specifically to a target, such as a small molecule, protein, nucleic acid in a cell. In some embodiments, the aptamer is a DNA aptamer or an RNA aptamer. In some embodiments, a nucleic acid aptamer is a single-stranded DNA or RNA (ssDNA or ssRNA). It is to be understood that a single-stranded nucleic acid aptamer may form helices and/or (e.g., and) loop structures. The nucleic acid that forms the nucleic acid aptamer may comprise naturally occurring nucleotides, modified nucleotides, naturally occurring nucleotides with hydrocarbon linkers (e.g., an alkylene) or a polyether linker (e.g., a PEG linker) inserted between one or more nucleotides, modified nucleotides with hydrocarbon or PEG linkers inserted between one or more nucleotides, or a combination of thereof. Exemplary publications and patents describing aptamers and method of producing aptamers include, e.g., Lorsch and Szostak, 1996; Jayasena, 1999; U.S. Pat. Nos. 5,270,163; 5,567,588; 5,650,275; 5,670,637; 5,683,867; 5,696,249; 5,789,157; 5,843,653; 5,864,026; 5,989,823; 6,569,630; 8,318,438 and PCT application WO 99/31275, each incorporated herein by reference.

### m. Ribozymes

[0645] In some embodiments, oligonucleotides provided herein may be in the form of a ribozyme. A ribozyme (ribonucleic acid enzyme) is a molecule, typically an RNA molecule, that is capable of performing specific biochemical reactions, similar to the action of protein enzymes. Ribozymes are molecules with catalytic activities including the ability to cleave at specific phosphodiester linkages in RNA molecules to which they have hybridized, such as mRNAs, RNA-containing substrates, IncRNAs, and ribozymes, themselves.

[0646] Ribozymes may assume one of several physical structures, one of which is called a “hammerhead.” A hammerhead ribozyme is composed of a catalytic core containing nine conserved bases, a double-stranded stem and loop structure (stem-loop II), and two regions complementary to the target RNA flanking regions the catalytic core. The flanking regions enable the ribozyme to bind to the target RNA specifically by forming double-stranded stems I and III. Cleavage occurs in cis (i.e., cleavage of the same RNA molecule that contains the hammerhead motif) or in trans (cleavage of an RNA substrate other than that containing the ribozyme) next to a specific ribonucleotide triplet by a transesterification reaction from a 3′, 5′-phosphate diester to a 2′, 3′-cyclic phosphate diester. Without wishing to be bound by theory, it is believed that this catalytic activity requires the presence of specific, highly conserved sequences in the catalytic region of the ribozyme.

[0647] Modifications in ribozyme structure have also included the substitution or replacement of various non-core portions of the molecule with non-nucleotidic molecules. For example, Benseler et al. (J. Am. Chem. Soc. (1993) 115:8483-8484) disclosed hammerhead-like molecules in which two of the base pairs of stem II, and all four of the nucleotides of loop II were replaced with non-nucleoside linkers based on hexaethylene glycol, propanediol, bis(triethylene glycol) phosphate, tris(propanediol)bisphosphate, or bis(propanediol) phosphate. Ma et al. (Biochem. (1993) 32:1751-1758; Nucleic Acids Res. (1993) 21:2585-2589) replaced the six nucleotide loop of the TAR ribozyme hairpin with non-nucleotidic, ethylene glycol-related linkers. Thomson et al. (Nucleic Acids Res. (1993) 21:5600-5603) replaced loop II with linear, non-nucleotidic linkers of 13, 17, and 19 atoms in length.

[0648] Ribozyme oligonucleotides can be prepared using well known methods (see, e.g., PCT Publications WO9118624; WO9413688; WO9201806; and WO 92/07065; and U.S. Pat. 5436143 and 5650502) or can be purchased from commercial sources (e.g., US Biochemicals) and, if desired, can incorporate nucleotide analogs to increase the resistance of the oligonucleotide to degradation by nucleases in a cell. The ribozyme may be synthesized in any known manner, e.g., by use of a commercially available synthesizer produced, e.g., by Applied Biosystems, Inc. or Milligen. The ribozyme may also be produced in recombinant vectors by conventional means. See, Molecular Cloning: A Laboratory Manual, Cold Spring Harbor Laboratory (Current edition). The ribozyme RNA sequences maybe synthesized conventionally, for example, by using RNA polymerases such as T7 or SP6.

### n. Guide Nucleic Acids

[0649] In some embodiments, oligonucleotides are guide nucleic acid, e.g., guide RNA (gRNA) molecules. Generally, a guide RNA is a short synthetic RNA composed of (1) a scaffold sequence that binds to a nucleic acid programmable DNA binding protein (napDNAbp), such as Cas9, and (2) a nucleotide spacer portion that defines the DNA target sequence (e.g., genomic DNA target) to which the gRNA binds in order to bring the nucleic acid programmable DNA binding protein in proximity to the DNA target sequence. In some embodiments, the napDNAbp is a nucleic acid-programmable protein that forms a complex with (e.g., binds or associates with) one or more RNA(s) that targets the nucleic acid-programmable protein to a target DNA sequence (e.g., a target genomic DNA sequence). In some embodiments, a nucleic acid -programmable nuclease, when in a complex with an RNA, may be referred to as a nuclease:RNA complex. Guide RNAs can exist as a complex of two or more RNAs, or as a single RNA molecule.

[0650] Guide RNAs (gRNAs) that exist as a single RNA molecule may be referred to as single-guide RNAs (sgRNAs), though gRNA is also used to refer to guide RNAs that exist as either single molecules or as a complex of two or more molecules. Typically, gRNAs that exist as a single RNA species comprise two domains: (1) a domain that shares homology to a target nucleic acid (i.e., directs binding of a Cas9 complex to the target); and (2) a domain that binds a Cas9 protein. In some embodiments, domain (2) corresponds to a sequence known as a tracrRNA and comprises a stem-loop structure. In some embodiments, domain (2) is identical or homologous to a tracrRNA as provided in Jinek et al., Science 337:816-821 (2012), the entire contents of which is incorporated herein by reference.

[0651] In some embodiments, a gRNA comprises two or more of domains (1) and (2), and may be referred to as an extended gRNA. For example, an extended gRNA will bind two or more Cas9 proteins and bind a target nucleic acid at two or more distinct regions, as described herein. The gRNA comprises a nucleotide sequence that complements a target site, which mediates binding of the nuclease/RNA complex to said target site, providing the sequence specificity of the nuclease:RNA complex. In some embodiments, the RNA-programmable nuclease is the (CRISPR-associated system) Cas9 endonuclease, for example, Cas9 (Csn1) from Streptococcus pyogenes (see, e.g., “Complete genome sequence of an Ml strain of Streptococcus pyogenes.” Ferretti J.J., McShan W.M., Ajdic D.J., Savic D.J., Savic G., Lyon K., Primeaux C., Sezate S., Suvorov A.N., Kenton S., Lai H.S., Lin S.P., Qian Y., Jia H.G., Najar F.Z., Ren Q., Zhu H., Song L., White J., Yuan X., Clifton S.W., Roe B.A., McLaughlin R.E., Proc. Natl. Acad. Sci. U.S.A. 98:4658-4663 (2001); “CRISPR RNA maturation by trans-encoded small RNA and host factor RNase III.” Deltcheva E., Chylinski K., Sharma C.M., Gonzales K., Chao Y., Pirzada Z.A., Eckert M.R., Vogel J., Charpentier E., Nature 471:602-607 (2011); and “A programmable dual-RNA-guided DNA endonuclease in adaptive bacterial immunity.” Jinek M., Chylinski K., Fonfara I., Hauer M., Doudna J.A., Charpentier E. Science 337:816-821 (2012), the entire contents of each of which are incorporated herein by reference.

### o. Splice Altering Oligonucleotides

[0652] In some embodiments, a oligonucleotide (e.g., an antisense oligonucleotide including a morpholino) of the present disclosure target splicing. In some embodiments, the oligonucleotide targets splicing by inducing exon skipping and restoring the reading frame within a gene. As a non-limiting example, the oligonucleotide may induce skipping of an exon encoding a frameshift mutation and/or (e.g., and) an exon that encodes a premature stop codon. In some embodiments, an oligonucleotide may induce exon skipping by blocking spliceosome recognition of a splice site. In some embodiments, exon skipping results in a truncated but functional protein compared to the reference protein (e.g., truncated but functional DMD protein as described below). In some embodiments, the oligonucleotide promotes inclusion of a particular exon (e.g., exon 7 of the SMN2 gene described below). In some embodiments, an oligonucleotide may induce inclusion of an exon by targeting a splice site inhibitory sequence. RNA splicing has been implicated in muscle diseases, including Duchenne muscular dystrophy (DMD) and spinal muscular atrophy (SMA).

[0653] Alterations (e.g., deletions, point mutations, and duplications) in the gene encoding dystrophin (DMD) cause DMD. These alterations can lead to frameshift mutations and/or (e.g., and) nonsense mutations. In some embodiments, an oligonucleotide of the present disclosure promotes skipping of one or more DMD exons (e.g., exon 8, exon 43, exon 44, exon 45, exon 50, exon 51, exon 52, exon 53, and/or (e.g., and) exon 55) and results in a functional truncated protein. See, e.g., U.S. Pat. No. 8,486,907 published on Jul. 16, 2013 and U.S. 20140275212 published on Sep. 18, 2014.

[0654] In SMA, there is loss of functional SMN1. Although the SMN2 gene is a paralog to SMN1, alternative splicing of the SMN2 gene predominantly leads to skipping of exon 7 and subsequent production of a truncated SMN protein that cannot compensate for SMN1 loss. In some embodiments, an oligonucleotide of the present disclosure promotes inclusion of SMN2 exon 7. In some embodiments, an oligonucleotide is an antisense oligonucleotide that targets SMN2 splice site inhibitory sequences (see, e.g., U.S. Pat. No. 7,838,657, which was published on Nov. 23, 2010).

### p. Multimers

[0655] In some embodiments, molecular payloads may comprise multimers (e.g., concatemers) of 2 or more oligonucleotides connected by a linker. In this way, in some embodiments, the oligonucleotide loading of a complex/conjugate can be increased beyond the available linking sites on a targeting agent (e.g., available thiol sites on an antibody) or otherwise tuned to achieve a particular payload loading content. Oligonucleotides in a multimer can be the same or different (e.g., targeting different genes or different sites on the same gene or products thereof).

[0656] In some embodiments, multimers comprise 2 or more oligonucleotides linked together by a cleavable linker. However, in some embodiments, multimers comprise 2 or more oligonucleotides linked together by a non-cleavable linker. In some embodiments, a multimer comprises 2, 3, 4, 5, 6, 7, 8, 9, 10 or more oligonucleotides linked together. In some embodiments, a multimer comprises 2 to 5, 2 to 10 or 4 to 20 oligonucleotides linked together.

[0657] In some embodiments, a multimer comprises 2 or more oligonucleotides linked end-to-end (in a linear arrangement). In some embodiments, a multimer comprises 2 or more oligonucleotides linked end-to-end via a oligonucleotide based linker (e.g., poly-dT linker, an abasic linker). In some embodiments, a multimer comprises a 5′ end of one oligonucleotide linked to a 3′ end of another oligonucleotide. In some embodiments, a multimer comprises a 3′ end of one oligonucleotide linked to a 3′ end of another oligonucleotide. In some embodiments, a multimer comprises a 5′ end of one oligonucleotide linked to a 5′ end of another oligonucleotide. Still, in some embodiments, multimers can comprise a branched structure comprising multiple oligonucleotides linked together by a branching linker.

[0658] Further examples of multimers that may be used in the complexes provided herein are disclosed, for example, in U.S. Pat. Application No. 2015/0315588 A1, entitled Methods of delivering multiple targeting oligonucleotides to a cell using cleavable linkers, which was published on Nov. 5, 2015; U.S. Pat. Application No. 2015/0247141 A1, entitled Multimeric Oligonucleotide Compounds, which was published on Sep. 3, 2015, U.S. Pat. Application No. US 2011/0158937 A1, entitled Immunostimulatory Oligonucleotide Multimers, which was published on Jun. 30, 2011; and U.S. Pat. No. 5,693,773, entitled Triplex-Forming Antisense Oligonucleotides Having Abasic Linkers Targeting Nucleic Acids Comprising Mixed Sequences Of Purines And Pyrimidines, which issued on Dec. 2, 1997, the contents of each of which are incorporated herein by reference in their entireties.

### ii. Small Molecules

[0659] Any suitable small molecule may be used as a molecular payload, as described herein. Non-limiting examples are provided below for selected genes of Table 1.

### Dmpk/dm1

[0660] In some embodiments, e.g., for the treatment of DM, the small molecule is as described in U.S. Pat. Application Publication 2016052914A1, published on Feb. 25, 2016, entitled “Compounds And Methods For Myotonic Dystrophy Therapy”. Further examples of small molecule payloads are provided in Lopez-Morato M, et al., Small Molecules Which Improve Pathogenesis of Myotonic Dystrophy Type 1, (Review) Front. Neurol., 18 May 2018. For example, in some embodiments, the small molecule is an MBNL1 upregulator such as phenylbuthazone, ketoprofen, ISOX, or vorinostat. In some embodiments, the small molecule is an H-Ras pathway inhibitor such as manumycin A. In some embodiments, the small molecule is a protein kinase modulator such as Ro-318220, C16, C51, Metformin, AICAR, lithium chloride, TDZD-8 or Bio. In some embodiments, the small molecule is a plant alkaloid such as harmine. In some embodiments, the small molecule is a transcription inhibitor such as pentamidine, propamidine, heptamidiine or actinomycin D. In some embodiments, the small molecule is an inhibitor of Glycogen synthase kinase 3 beta (GSK3B), for example, as disclosed in Jones K, et al., GSK3β mediates muscle pathology in myotonic dystrophy. J Clin Invest. 2012 Dec;122(12):4461-72; and Wei C, et al., GSK3β is a new therapeutic target for myotonic dystrophy type 1. Rare Dis. 2013; 1: e26555; and Palomo V, et al., Subtly Modulating Glycogen Synthase Kinase 3 β: Allosteric Inhibitor Development and Their Potential for the Treatment of Chronic Diseases. J Med Chem. 2017 Jun 22;60(12):4983-5001, the contents of each of which are incorporated herein by reference in their entireties. In some embodiments, the small molecule is a substituted pyrido[2,3-d]pyrimidines and pentamidine-like compound, as disclosed in Gonzalez AL, et al., In silico discovery of substituted pyrido[2,3-d]pyrimidines and pentamidine-like compounds with biological activity in myotonic dystrophy models. PLoS One. 2017 Jun 5;12(6):e0178931, the contents of which are incorporated herein by reference in its entirety. In some embodiments, the small molecule is an MBNL1 modulator, for example, as disclosed in: Zhange F, et al., A flow cytometry-based screen identifies MBNL1 modulators that rescue splicing defects in myotonic dystrophy type I. Hum Mol Genet. 2017 Aug 15;26(16):3056-3068, the contents of which are incorporated herein by reference in its entirety.

### Dux4 / Fshd

[0661] In some embodiments, e.g., for the treatment of FSHD, the small molecule payload is as described in U.S. Pat. Application Publication 20170340606, published on Nov. 30, 2017, entitled “METHODS OF TREATING MUSCULAR DYSTROPHY” or as described in US Pat. Application Publication 20180050043, published on Feb. 22, 2018, entitled “INHIBITION OF DUX4 EXPRESSION USING BROMODOMAIN AND EXTRA-TERMINAL DOMAIN PROTEIN INHIBITORS (BETi). Further examples of small molecule payloads are provided in Bosnakovski, D., et al., High-throughput screening identifies inhibitors of DUX4-induced myoblast toxicity, Skelet Muscle, February 2014, and Choi. S., et al., “Transcriptional Inhibitors Identified in a 160,000-Compound Small-Molecule DUX4 Viability Screen,” Journal of Biomolecular Screening, 2016. For example, in some embodiments, the small molecule is a transcriptional inhibitor, such as SHC351, SHC540, SHC572. In some embodiments, the small molecule is STR00316 increases production or activity of another protein, such as integrin. In some embodiments, the small molecule is a bromodomain inhibitor (BETi), such as JQ1, PF1-1, I-BET-762, I-BET-151, RVX-208, or CPI-0610.

### Dnm/ Cnm

[0662] In some embodiments, e.g., for the treatment of CNM, the small molecule, for the treatment of CNM, is as described in US Pat. Application Publication No. 20160264976, published on Sep. 15, 2016, entitled “DYNAMIN 2 INHIBITOR FOR TREATMENT OF CENTRONUCLEAR MYOPATHIES”. For example, in some embodiments, the small molecule is selected from a group consisting of 3-Hydroxynaphthalene-2-carboxylic acid (3,4-dihydroxybenzylidene) hydrazide, 3-Hydroxy-N′-[(2,4,5-trihydroxyphenyl)methylidene]naphthalene-2-carbohydr-azide. In some embodiments, the small molecule is as described in US Pat. Application Publication No. 20180000762, published Jan. 4, 2018, entitled “COMPOSITION AND METHOD FOR MUSCLE REPAIR AND REGENERATION”. In some embodiments, the small molecule is a retinoic receptor agonist, such as 4-[(E)-2-[5,6,7,8-Tetrahydro-5,5,8,8-tetramethyl-3-(1H-pyrazol-1-ylmethyl-)-2-naphthalenyl]-ethenyl]-benzoic acid. In some embodiments, the small molecule is as described in US Patent Application Publication Number 20170119748, published May 4, 2017, entitled “METHODS, COMPOUNDS, AND COMPOSITIONS FOR THE TREATMENT OF MUSCULOSKELETAL DISEASES.” The contents of each of these publications listed above are incorporated herein in their entirety.

### Pompe Disease

[0663] In some embodiments, e.g., for the treatment of Pompe disease, the small molecule is a 1-deoxynojirimycin (DNJ) derivative, such as N-butyl-DNJ, N-methyl-DNJ, or N-cyclopropylmethyl-DNJ as described in US Pat. Application Publication No. 20160051528, published on Feb. 25, 2016, entitled “METHOD FOR TREATMENT OF POMPE DISEASE USING 1-DEOXYNOJIRIMYCIN DERIVATIVES”. In some embodiments, the small molecule DNJ derivative is used as a molecular chaperone to increase the activity of a GAA. In some embodiments, the non-inhibitory acid alpha glucosidase chaperone ML247 small molecule is utilized as in Marugan, et al., “Discovery, SAR, and Biological Evaluation of a Non-Inhibitory Chaperone for Acid Alpha Glucosidase,” published in Probe Reports from NIH Molecular Libraries in December 2011. For example, the small molecule chaperone ML247 is utilized to increase the activity of a PD-associated GAA allele or a wild-type GAA allele. The contents of each of these publications listed above are incorporated herein in their entirety.

### FXN / Friedreich’s Ataxia

[0664] In some embodiments, e.g., for the treatment of Friedreich’s Ataxia, the small molecule is as described in Herman D. et al. “Histone deacetylase inhibitors reverse gene silencing in Friedreich’s ataxia.” Nat Chem Biol. 2006;2:551-558. In some embodiments, the small molecule is as described in Rai, M. et al. “HDAC inhibitors correct frataxin deficiency in a Friedreich ataxia mouse model.” PLoS One. 2008 Apr 9; 3(4):e1958. Further examples of small molecule payloads are provided in Richardson, T.E. et al, “Therapeutic strategies in Friedreich’s Ataxia”, Brain Res. 2013 Jun 13; 1514: 91-97; Zeier Z et al. “Bromodomain inhibitors regulate the C9ORF72 locus in ALS” Exp Neurol. 2015 Sep;271:241-50.; and Gottesfeld J.M. “Small molecules affecting transcription in Friedreich ataxia.” Pharmacol Ther. 2007 Nov;116(2):236-48. For example, in some embodiments, the small molecule is an inhibitor of a histone deacetylase, e.g., BML-210 and compound 106. In some embodiments, the small molecule is 17β-Estradiol or methylene blue. In some embodiments, the small molecule targets, e.g., binds to, a disease-associated-repeat and/or (e.g., and) R-loop. In some embodiments, the small molecule is as described in WO 2004/003565, published Jan. 8, 2004, “A screening method and compounds for treating friedreich ataxia”. In some embodiments, the small molecule is a Glutathione peroxidase mimetic.

### DMD/Dystrophinopathies

[0665] In some embodiments, the small molecule enhances exon skipping of an mRNA expression from a mutant DMD allele. In some embodiments, the small molecule is as described in US Pat. Application Publication US20140080896A1, published Mar. 20, 2014, entitled “IDENTIFICATION OF SMALL MOLECULES THAT FACILITATE THERAPEUTIC EXON SKIPPING”. Further examples of small molecule payloads are provided in U.S. Pat. No. 9,982,260, issued May 29, 2018, entitled “Identification of structurally similar small molecules that enhance therapeutic exon skipping”. For example, in some embodiments, the small molecule is an enhancer of exon skipping such as perphenazine, flupentixol, zuclopenthixol or corynanthine. In some embodiments, a small molecule enhancer of exon skipping inhibits the ryanodine receptor or calmodulin. In some embodiments, the small molecule is an H-Ras pathway inhibitor such as manumycin A. In some embodiments, the small molecule is a suppressor of stop codons and desensitizes ribosomes to premature stop codons. In some embodiments, the small molecule is ataluren, as described in McElroy S.P. et al. “A Lack of Premature Termination Codon Read Through Efficacy of PTC 124 (Ataluren) in a Diverse Array of Reporter Assays.” PLOS Biology, published Jun. 25, 2013. In some embodiments, the small molecule is a corticosteroid, e.g., as described in Manzur, A.Y. et al. “Glucocorticoid corticosteroids for Duchenne muscular dystrophy”. Cochrane Database Syst Rev. 2004;(2):CD003725. In some embodiments, the small molecule upregulates the expression and/or (e.g., and) activity of genes that can replace the function of dystrophin, such as utrophin. In some embodiments, a utrophin modulator is as described in International Publication No. WO2007091106, published Aug. 16, 2007, entitled “TREATMENT OF DUCHENNE MUSCULAR DYSTROPHY” and/or (e.g., and) International Publication No. WO/2017/168151, published Oct. 5, 2017, entitled “COMPOSITION FOR THE TREATMENT OF DUCHENNE MUSCULAR DYSTROPHY”.

### MYH7 / Hypertrophic Cardiomyopathy

[0666] In some embodiments, the small molecule is a hypomethylating agent, such as 5-Azacytidine or 5-Aza-2′-Deoxycytidine, which modulates the expression of the MYH7 gene, such as in US Pat. Application Publication 20160106771, published on Apr. 21, 2016, entitled Therapies for Cardiomyopathy; in some embodiments, the small molecule is a JAK-STAT inhibitor such as nifuroxazide, ketoprofen, sulfasalazine, 5,15-diphenylporphyrin, or AG490, such as in US Pat. Application Publication 20180185478, published on Jul. 5, 2018, entitled Treatment for Myopathy; in some embodiments the small molecule is para-Nitroblebbistatin, which reduces the force of myosin contraction while not changing the dissociation of ADP, as in Tang, W., et al. “Modulating Beta-Cardiac Myosin Function at the Molecular and Tissue Levels,” Front. Physiol. 2016 (7): 659, the contents of any of which are incorporated herein by reference in their entirety.

### iii. Peptides/Proteins

[0667] Any suitable peptide or protein may be used as a molecular payload, as described herein. In some embodiments, a protein is an enzyme (e.g., an acid alpha-glucosidase, e.g., as encoded by the GAA gene). These peptides or proteins may be produced, synthesized, and/or (e.g., and) derivatized using several methodologies, e.g. phage displayed peptide libraries, one-bead one-compound peptide libraries, or positional scanning synthetic peptide combinatorial libraries. Exemplary methodologies have been characterized in the art and are incorporated by reference (Gray, B.P. and Brown, K.C. “Combinatorial Peptide Libraries: Mining for Cell-Binding Peptides” Chem Rev. 2014, 114:2, 1020-1081.; Samoylova, T.I. and Smith, B.F. “Elucidation of muscle-binding peptides by phage display screening.” Muscle Nerve, 1999, 22:4. 460-6.).

[0668] Non-limiting examples are provided below for selected genes of Table 1.

### Dmpk/dm1

[0669] A peptide or protein payload, e.g., for the treatment of DM1, may correspond to a sequence of a protein that preferentially binds to a nucleic acid, e.g. a disease-associated repeat, or a protein, e.g. MBNL1, found in muscle cells. In some embodiments, the peptide is as described in U.S. Pat. Application 2018/0021449, published on Jan. 25, 2018, “Antisense conjugates for decreasing expression of DMPK”. In some embodiments, the peptide is as described in Garcia-Lopez et al., “In vivo discovery of a peptide that prevents CUG-RNA hairpin formation and reverses RNA toxicity in myotonic dystrophy models”, PNAS Jul. 19, 2011. 108 (29) 11866-11871. In some embodiments, the peptide or protein may target, e.g., bind to, a disease-associated repeat, e.g. a RNA CUG repeat expansion.

[0670] In some embodiments, e.g., for the treatment of DM1, the peptide or protein comprises a fragment of an MBNL protein, e.g., MBNL1. In some embodiments, the peptide or protein comprises at least one zinc finger. In some embodiments, the peptide or protein may comprise about 2-25 amino acids, about 2-20 amino acids, about 2-15 amino acids, about 2-10 amino acids, or about 2-5 amino acids. The peptide or protein may comprise naturally-occurring amino acids, e.g. cysteine, alanine, or non-naturally-occurring or modified amino acids. Non-naturally occurring amino acids include β-amino acids, homo-amino acids, proline derivatives, 3-substituted alanine derivatives, linear core amino acids, N-methyl amino acids, and others known in the art. In some embodiments, the peptide may be linear; in other embodiments, the peptide may be cyclic, e.g. bicyclic.

### Dux4 / Fshd

[0671] In some embodiments, e.g., for the treatment of FSHD, the peptide or protein may bind a DME1 or DME2 enhancer to inhibit DUX4 expression, e.g., by blocking binding of an activator.

### Dnm2 / Cnm

[0672] In some embodiments, e.g., for the treatment of CNM, the peptide is a dynamin inhibitor peptide with amino acid sequence QVPSRPNRAP, as described in US Pat. Application Publication Number 20160264976, published on Sep. 15, 2016, entitled “DYNAMIN 2 INHIBITOR FOR TREATMENT OF CENTRONUCLEAR MYOPATHIES”.

### Pompe Disease

[0673] In some embodiments, e.g., for the treatment of Pompe disease, the molecular payload is a protein or enzyme such as an acid alpha-glucosidase or wild-type GAA protein or an active fragment thereof as in U.S. Pat. Application Publication No. 20160346363, published on Dec. 1, 2016, entitled “METHODS AND ORAL FORMULATIONS FOR ENZYME REPLACEMENT THERAPY OF HUMAN LYSOSOMAL AND METABOLIC DISEASES,” U.S. Pat. Application Publication No. 20160279254, published Sep. 29, 2016, entitled “METHODS AND MATERIALS FOR TREATMENT OF POMPE′ S DISEASE”, or U.S. Pat. Application Publication No. 20130243746, published on Sep. 19, 2013, entitled “METHODS AND MATERIALS FOR TREATMENT OF POMPE’S DISEASE”. In some embodiments, the acid alpha-glucosidase or wild-type GAA protein increases the GAA activity of a subject. In some embodiments, the acid alpha-glucosidase or wild-type GAA protein is encoded by the GAA gene.

### Acvr1 / Fop

[0674] In some embodiments, e.g., for the treatment of FOP, the peptide or protein is a BMP inhibitor such as regulatory SMAD 6 and 7 or fragment thereof. Additional examples of peptides or proteins are included in Cappato, S. et al. “The Horizon of a Therapy for Rare Genetic Diseases: A “Druggable” Future for Fibrodysplasia Ossificans Progressiva” Int. J. Mol. Sci. 2018, 19(4), 989. The contents of each of the foregoing are incorporated herein by reference in their entireties.

### FXN / Friedreich Ataxia

[0675] In some embodiments, e.g., for the treatment of Friedreich’s Ataxia, the peptide is as described in U.S. Pat. No. 8,815,230, filed Aug. 30, 2010, “Methods for treating Friedreich’s ataxia with interferon gamma”. In some embodiments, the peptide is as described in Britti, E. et al. “Frataxin-deficient neurons and mice models of Friedreich ataxia are improved by TAT-MTScs-FXN treatment.” J Cell Mol Med. 2018 Feb;22(2):834-848. In some embodiments, the peptide is as described in Zhao, H. et al., “Peptide SS-31 upregulates frataxin expression and improves the quality of mitochondria: implications in the treatment of Friedreich ataxia”, Sci Rep. 2017 Aug 29;7(1):9840. In some embodiments, the peptide is as described in Vyas, P.M. et al. “A TAT-frataxin fusion protein increases lifespan and cardiac function in a conditional Friedreich’s ataxia mouse model”, Hum Mol Genet. 2012 Mar 15;21(6): 1230-47. In some embodiments, the peptide or protein may target, e.g., bind to, a disease-associated repeat, e.g. a GAA repeat expansion.

### DMD/Dystrophinopathies

[0676] In some embodiments, e.g., for the treatment of dystrophinopathies, such as Duchenne muscular dystrophy, a peptide may facilitate exon skipping in an mRNA expressed from a mutant DMD allele. In some embodiments, a peptide may promote the expression of functional dystrophin and/or (e.g., and) the expression of a protein capable of functioning in place of dystrophin. In some embodiments, payload is a protein that is a functional fragment of dystrophin, e.g. an amino acid segment of a functional dystrophin protein.

### iv. Nucleic Acid Constructs

[0677] Any suitable gene expression construct may be used as a molecular payload, as described herein. In some embodiments, a gene expression construct may be a vector or a cDNA fragment. In some embodiments, a gene expression construct may be messenger RNA (mRNA). In some embodiments, a mRNA used herein may be a modified mRNA, e.g., as described in U.S. Pat. 8,710,200, issued on Apr. 24, 2014, entitled “Engineered nucleic acids encoding a modified erythropoietin and their expression”. In some embodiments, a mRNA may comprise a 5′ methyl cap. In some embodiments, a mRNA may comprise a polyA tail, optionally of up to 160 nucleotides in length. A gene expression construct may encode a sequence of a protein that is deficient in a muscle disease. In some embodiments, the gene expression construct may be expressed, e.g., overexpressed, within the nucleus of a muscle cell. In some embodiments, the gene expression construct encodes a gene that is deficient in a muscle disease. In some embodiments, the gene expression constructs encodes a protein that comprises at least one zinc finger. In some embodiments, the gene expression construct encodes a protein that binds to a gene in Table 1. In some embodiments, the gene expression construct encodes a protein that leads to a reduction in the expression of a protein (e.g., mutant protein) encoded by a gene in Table 1. In some embodiments, the gene expression construct encodes a gene editing enzyme. Additional examples of nucleic acid constructs that may be used as molecular payloads are provided in International Patent Application Publication WO2017152149A1, published on Sep. 19, 2017, entitled, “CLOSED-ENDED LINEAR DUPLEX DNA FOR NON-VIRAL GENE TRANSFER”; U.S. Pat. 8,853,377B2, issued on Oct. 7, 2014, entitled, “MRNA FOR USE IN TREATMENT OF HUMAN GENETIC DISEASES”; and U.S. Pat. US8822663B2, issued on Sep. 2, 2014, ENGINEERED NUCLEIC ACIDS AND METHODS OF USE THEREOF,” the contents of each of which are incorporated herein by reference in their entireties.

[0678] Further non-limiting examples are provided below for selected genes/disease of Table 1.

### Dmpk/dm1

[0679] In some embodiments, e.g., for the treatment of DM, the gene expression construct encodes a MBNL protein, e.g., MBNL1.

### Dux4 / Fshd

[0680] In some embodiments, e.g., for the treatment of FSHD, the gene expression construct encodes a oligonucleotide (e.g., an shRNA targeting DUX4) or a protein that downregulates the expression of DUX4 (e.g., a peptide or protein that binds to DME1 or DME2 enhancer to inhibit DUX4 expression, e.g., by blocking binding of an activator).

### Dnm2 / Cnm

[0681] In some embodiments, e.g., for the treatment of CNM1, a gene expression construct may encode a sequence of a protein that downregulates the expression of a mutant DNM2 protein, or which expresses wild-type DNM2. In some embodiments, a gene expression construct encodes an oligonucleotide (e.g., an shRNA) that inhibits expression of DNM2. However, in some embodiments, an expression construct encodes Spliceosome-Mediated RNA Trans-splicing components that may be used to reprogram mutated DNM2-mRNA, as disclosed in Trochet D., et al., Reprogramming the Dynamin 2 mRNA by Spliceosome-mediated RNA Trans-splicing Mol Ther Nucleic Acids. 2016 Sep; 5(9): e362, the contents of which are incorporated herein by reference.

### Pompe Disease

[0682] In some embodiments, e.g., for the treatment of Pompe disease, the gene expression construct encodes a wild-type GAA protein. A gene expression construct may encode a sequence of a protein that leads to decreased expression of ACVR1 gene or decreased activity of GYS1 protein. In some embodiments, e.g., for the treatment of Pompe disease, the gene expression construct encodes and oligonucleotide (e.g., shRNA) that inhibits expression of GYS1.

### Acvr1 / Fop

[0683] A gene expression construct may encode a sequence of a protein that leads to decreased expression of ACVR1 gene or decreased activity of ACVR1 protein. In some embodiments, the gene expression construct encodes a protein that leads to a reduction in the expression of a epigenetic regulators that negatively regulate the expression of ACVR1, e.g. histone deactylases. In some embodiments, the gene expression construct encodes an oligonucleotide (e.g., shRNA) that inhibits expression of ACVR1.

### FXN/Friedreich’s Ataxia

[0684] A gene expression construct may encode a sequence of a protein that leads to increased expression of frataxin. In some embodiments, the gene expression construct may be expressed, e.g., overexpressed, within the nucleus of a muscle cell. In some embodiments, the gene expression construct encodes frataxin. In some embodiments, the gene expression constructs encodes a protein that inhibit the function of epigenetic regulators that negatively regulate the expression of FXN, e.g. histone deactylases. In some embodiments, the gene expression construct encodes a protein that binds to a disease-associated-repeat expansion of a GAA trinucleotide. In some embodiments, the gene expression construct encodes a protein that leads to a reduction in the expression of a epigenetic regulators that negatively regulate the expression of FXN, e.g. histone deactylases. In some embodiments, the gene expression construct encodes a gene editing enzyme. In some embodiments, the gene expression construct encodes erythropoietin (see, e.g. Miller, J.L. et al, “Erythropoietin and small molecule agonists of the tissue-protective erythropoietin receptor increase FXN expression in neuronal cells in vitro and in FXN-deficient KIKO mice in vivo”, Neuropharmacology. 2017 Sep 1;123:34-45.). In some embodiments, the gene expression construct encodes interferon gamma (see, e.g. U.S. Pat. No. 8,815,230, filed Aug. 30, 2010, “Methods for treating Friedreich’s ataxia with interferon gamma”).

### DMD/Dystrophinopathies

[0685] A gene expression construct may encode a sequence of a dystrophin protein, a dystrophin fragment, a mini-dystrophin, a utrophin protein, or any protein that shares a common function with dystrophin. In some embodiments, the gene expression construct may be expressed, e.g., overexpressed, within the nucleus of a muscle cell. In some embodiments, the gene expression constructs encodes a protein that comprises at least one zinc finger. In some embodiments, the gene expression construct encodes a protein that promotes the expression of dystrophin or a protein that shares function with dystrophin, e.g., utrophin. In some embodiments, the gene expression construct encodes a gene editing enzyme. In some embodiments, the gene expression construct is as described in U.S. Pat. Application Publication US20170368198A1, published Dec. 28, 2017, entitled “Optimized mini-dystrophin genes and expression cassettes and their use”; Duan D. “Myodys, a full-length dystrophin plasmid vector for Duchenne and Becker muscular dystrophy gene therapy.” Curr Opin Mol Ther 2008;10:86-94; and expression cassettes disclosed in Tang, Y. et al., “AAV-directed muscular dystrophy gene therapy” Expert Opin Biol Ther. 2010 Mar; 10(3):395-408; the contents of each of which are incorporated herein by reference in their entireties.

[0686] Further examples of complexes and molecular payloads (e.g., oligonucleotides useful for targeting muscle genes) are provided in International Patent Application Publication WO2020/028861, published on Feb. 6, 2020, entitled, “MUSCLE TARGETING COMPLEXES AND USES THEREOF FOR TREATING MYOTONIC DYSTROPHY”; International Patent Application Publication WO2020/028864, published on Feb. 6, 2020, entitled, “MUSCLE TARGETING COMPLEXES AND USES THEREOF FOR TREATING FACIOSCAPULOHUMERAL MUSCULAR DYSTROPHY”; International Patent Application Publication WO2020/028844, published on Feb. 6, 2020, entitled, “MUSCLE TARGETING COMPLEXES AND USES THEREOF FOR TREATING CENTRONUCLEAR MYOPATHY”; International Patent Application Publication WO2020/028841, published on Feb. 6, 2020, entitled, “MUSCLE TARGETING COMPLEXES AND USES THEREOF FOR TREATING POMPE DISEASE”; International Patent Application Publication WO2020/028831, published on Feb. 6, 2020, entitled, “MUSCLE TARGETING COMPLEXES AND USES THEREOF FOR TREATING FIBRODYSPLASIA OSSIFICANS PROGRESSIVA”; International Patent Application Publication WO2020/028840, published on Feb. 6, 2020, entitled, “MUSCLE TARGETING COMPLEXES AND USES THEREOF FOR TREATING FRIEDREICH’S ATAXIA”; International Patent Application Publication WO2020/028857, published on Feb. 6, 2020, entitled, “MUSCLE-TARGETING COMPLEXES AND USES THEREOF”; International Patent Application Publication WO2020/028836, published on Feb. 6, 2020, entitled, “MUSCLE-TARGETING COMPLEXES AND USES THEREOF IN TREATING MUSCLE ATROPHY”; International Patent Application Publication WO2020/028832, published on Feb. 6, 2020, entitled, “MUSCLE TARGETING COMPLEXES AND USES THEREOF FOR TREATING DYSTROPHINOPATHIES”; International Patent Application Publication WO2020/028842, published on Feb. 6, 2020, entitled, “MUSCLE TARGETING COMPLEXES AND USES THEREOF FOR TREATING HYPERTROPHIC CARDIOMYOPATHY”; the contents of each of which are incorporated herein by reference.

### C. Linkers

[0687] Complexes described herein generally comprise a linker that connects a muscle-targeting agent to a molecular payload. A linker comprises at least one covalent bond. In some embodiments, a linker may be a single bond, e.g., a disulfide bond or disulfide bridge, that connects a muscle-targeting agent to a molecular payload. However, in some embodiments, a linker may connect a muscle-targeting agent to a molecular payload through multiple covalent bonds. In some embodiments, a linker may be a cleavable linker. However, in some embodiments, a linker may be a non-cleavable linker. A linker is generally stable in vitro and in vivo, and may be stable in certain cellular environments. Additionally, generally a linker does not negatively impact the functional properties of either the muscle-targeting agent or the molecular payload. Examples and methods of synthesis of linkers are known in the art (see, e.g. Kline, T. et al. “Methods to Make Homogenous Antibody Drug Conjugates.” Pharmaceutical Research, 2015, 32:11, 3480-3493.; Jain, N. et al. “Current ADC Linker Chemistry” Pharm Res. 2015, 32:11, 3526-3540.; McCombs, J.R. and Owen, S.C. “Antibody Drug Conjugates: Design and Selection of Linker, Payload and Conjugation Chemistry” AAPS J. 2015, 17:2, 339-351.).

[0688] A precursor to a linker typically will contain two different reactive species that allow for attachment to both the muscle-targeting agent and a molecular payload. In some embodiments, the two different reactive species may be a nucleophile and/or (e.g., and) an electrophile. In some embodiments, a linker is connected to a muscle-targeting agent via conjugation to a lysine residue or a cysteine residue of the muscle-targeting agent. In some embodiments, a linker is connected to a cysteine residue of a muscle-targeting agent via a maleimide-containing linker, wherein optionally the maleimide-containing linker comprises a maleimidocaproyl or maleimidomethyl cyclohexane-1-carboxylate group. In some embodiments, a linker is connected to a cysteine residue of a muscle-targeting agent or thiol functionalized molecular payload via a 3-arylpropionitrile functional group. In some embodiments, a linker is connected to a lysine residue of an anti-TfR antibody. In some embodiments, a linker is connected to a muscle-targeting agent and/or (e.g., and) a molecular payload via an amide bond, a carbamate bond, a hydrazide, a triazole, a thioether or a disulfide bond.

### i. Cleavable Linkers

[0689] A cleavable linker may be a protease-sensitive linker, a pH-sensitive linker, or a glutathione-sensitive linker. These linkers are generally cleavable only intracellularly and are preferably stable in extracellular environments, e.g. extracellular to a muscle cell.

[0690] Protease-sensitive linkers are cleavable by protease enzymatic activity. These linkers typically comprise peptide sequences and may be 2-10 amino acids, about 2-5 amino acids, about 5-10 amino acids, about 10 amino acids, about 5 amino acids, about 3 amino acids, or about 2 amino acids in length. In some embodiments, a peptide sequence may comprise naturally-occurring amino acids, e.g. cysteine, alanine, or non-naturally-occurring or modified amino acids. Non-naturally occurring amino acids include β-amino acids, homo-amino acids, proline derivatives, 3-substituted alanine derivatives, linear core amino acids, N-methyl amino acids, and others known in the art. In some embodiments, a protease-sensitive linker comprises a valine-citrulline or alanine-citrulline dipeptide sequence. In some embodiments, a protease-sensitive linker can be cleaved by a lysosomal protease, e.g. cathepsin B, and/or (e.g., and) an endosomal protease.

[0691] A pH-sensitive linker is a covalent linkage that readily degrades in high or low pH environments. In some embodiments, a pH-sensitive linker may be cleaved at a pH in a range of 4 to 6. In some embodiments, a pH-sensitive linker comprises a hydrazone or cyclic acetal. In some embodiments, a pH-sensitive linker is cleaved within an endosome or a lysosome.

[0692] In some embodiments, a glutathione-sensitive linker comprises a disulfide moiety. In some embodiments, a glutathione-sensitive linker is cleaved by an disulfide exchange reaction with a glutathione species inside a cell. In some embodiments, the disulfide moiety further comprises at least one amino acid, e.g. a cysteine residue.

[0693] In some embodiments, the linker is a Val-cit linker (e.g., as described in U.S. Pat. 6,214,345, incorporated herein by reference). In some embodiments, before conjugation, the val-cit linker has a structure of:

[chemical structure]

[0694] In some embodiments, after conjugation, the val-cit linker has a structure of:

[chemical structure]

[0695] In some embodiments, the Val-cit linker is attached to a reactive chemical moiety (e.g., SPAAC for click chemistry conjugation). In some embodiments, before click chemistry conjugation, the val-cit linker attached to a reactive chemical moiety (e.g., SPAAC for click chemistry conjugation) has the structure of:

[chemical structure]

wherein n is any number from 0-10. In some embodiments, n is 3.

[0696] In some embodiments, the val-cit linker attached to a reactive chemical moiety (e.g., SPAAC for click chemistry conjugation) is conjugated (e.g., via a different chemical moiety) to a molecular payload (e.g., an oligonucleotide). In some embodiments, the val-cit linker attached to a reactive chemical moiety (e.g., SPAAC for click chemistry conjugation) and is conjugated to a molecular payload (e.g., an oligonucleotide) has the structure of (before click chemistry conjugation):

[chemical structure]

wherein n is any number from 0-10. In some embodiments, n is 3.

[0697] In some embodiments, after conjugation to a molecular payload (e.g., an oligonucleotide) and, the val-cit linker has a structure of:

[chemical structure]

wherein n is any number from 0-10, and wherein m is any number from 0-10. In some embodiments, n is 3 and m is 4.

### ii. Non-Cleavable Linkers

[0698] In some embodiments, non-cleavable linkers may be used. Generally, a non-cleavable linker cannot be readily degraded in a cellular or physiological environment. In some embodiments, a non-cleavable linker comprises an optionally substituted alkyl group, wherein the substitutions may include halogens, hydroxyl groups, oxygen species, and other common substitutions. In some embodiments, a linker may comprise an optionally substituted alkyl, an optionally substituted alkylene, an optionally substituted arylene, a heteroarylene, a peptide sequence comprising at least one non-natural amino acid, a truncated glycan, a sugar or sugars that cannot be enzymatically degraded, an azide, an alkyne-azide, a peptide sequence comprising a LPXTG sequence (SEQ ID NO: 257), a thioether, a biotin, a biphenyl, repeating units of polyethylene glycol or equivalent compounds, acid esters, acid amides, sulfamides, and/or (e.g., and) an alkoxy-amine linker. In some embodiments, sortase-mediated ligation will be utilized to covalently link a muscle-targeting agent comprising a LPXTG sequence (SEQ ID NO: 257) to a molecular payload comprising a (G)ₙ sequence (see, e.g. Proft T. Sortase-mediated protein ligation: an emerging biotechnology tool for protein modification and immobilization. Biotechnol Lett. 2010, 32(1): 1-10.). In some embodiments, a linker comprises a LPXTG sequence (SEQ ID NO: 257), where X is any amino acid.

[0699] In some embodiments, a linker may comprise a substituted alkylene, an optionally substituted alkenylene, an optionally substituted alkynylene, an optionally substituted cycloalkylene, an optionally substituted cycloalkenylene, an optionally substituted arylene, an optionally substituted heteroarylene further comprising at least one heteroatom selected from N, O, and S,; an optionally substituted heterocyclylene further comprising at least one heteroatom selected from N, O, and S,; an imino, an optionally substituted nitrogen species, an optionally substituted oxygen species O, an optionally substituted sulfur species, or a poly(alkylene oxide), e.g. polyethylene oxide or polypropylene oxide.

### iii. Linker Conjugation

[0700] In some embodiments, a linker is connected to a muscle-targeting agent and/or (e.g., and) molecular payload via a phosphate, thioether, ether, carbon-carbon, a carbamate, or amide bond. In some embodiments, a linker is connected to an oligonucleotide through a phosphate or phosphorothioate group, e.g. a terminal phosphate of an oligonucleotide backbone. In some embodiments, a linker is connected to an muscle-targeting agent, e.g. an antibody, through a lysine or cysteine residue present on the muscle-targeting agent

[0701] In some embodiments, a linker is connected to a muscle-targeting agent and/or (e.g., and) molecular payload by a cycloaddition reaction between an azide and an alkyne to form a triazole, wherein the azide and the alkyne may be located on the muscle-targeting agent, molecular payload, or the linker. In some embodiments, an alkyne may be a cyclic alkyne, e.g., a cyclooctyne. In some embodiments, an alkyne may be bicyclononyne (also known as bicyclo[6.1.0]nonyne or BCN) or substituted bicyclononyne. In some embodiments, a cyclooctane is as described in International Patent Application Publication WO2011136645, published on Nov. 3, 2011, entitled, “Fused Cyclooctyne Compounds And Their Use In Metal-free Click Reactions”. In some embodiments, an azide may be a sugar or carbohydrate molecule that comprises an azide. In some embodiments, an azide may be 6-azido-6-deoxygalactose or 6-azido-N-acetylgalactosamine. In some embodiments, a sugar or carbohydrate molecule that comprises an azide is as described in International Patent Application Publication WO2016170186, published on Oct. 27, 2016, entitled, “Process For The Modification Of A Glycoprotein Using A Glycosyltransferase That Is Or Is Derived From A β(1,4)-N-Acetylgalactosaminyltransferase”. In some embodiments, a cycloaddition reaction between an azide and an alkyne to form a triazole, wherein the azide and the alkyne may be located on the muscle-targeting agent, molecular payload, or the linker is as described in International Patent Application Publication WO2014065661, published on May 1, 2014, entitled, “Modified antibody, antibody-conjugate and process for the preparation thereof”; or International Patent Application Publication WO2016170186, published on Oct. 27, 2016, entitled, “Process For The Modification Of A Glycoprotein Using A Glycosyltransferase That Is Or Is Derived From A β(1,4)-N-Acetylgalactosaminyltransferase”.

[0702] In some embodiments, a linker further comprises a spacer, e.g., a polyethylene glycol spacer or an acyl/carbomoyl sulfamide spacer, e.g., a HydraSpace™ spacer. In some embodiments, a spacer is as described in Verkade, J.M.M. et al., “A Polar Sulfamide Spacer Significantly Enhances the Manufacturability, Stability, and Therapeutic Index of Antibody-Drug Conjugates”, Antibodies, 2018, 7, 12.

[0703] In some embodiments, a linker is connected to a muscle-targeting agent and/or (e.g., and) molecular payload by the Diels-Alder reaction between a dienophile and a diene/hetero-diene, wherein the dienophile and the diene/hetero-diene may be located on the muscle-targeting agent, molecular payload, or the linker. In some embodiments a linker is connected to a muscle-targeting agent and/or (e.g., and) molecular payload by other pericyclic reactions, e.g. ene reaction. In some embodiments, a linker is connected to a muscle-targeting agent and/or (e.g., and) molecular payload by an amide, thioamide, or sulfonamide bond reaction. In some embodiments, a linker is connected to a muscle-targeting agent and/or (e.g., and) molecular payload by a condensation reaction to form an oxime, hydrazone, or semicarbazide group existing between the linker and the muscle-targeting agent and/or (e.g., and) molecular payload.

[0704] In some embodiments, a linker is connected to a muscle-targeting agent and/or (e.g., and) molecular payload by a conjugate addition reactions between a nucleophile, e.g. an amine or a hydroxyl group, and an electrophile, e.g. a carboxylic acid, carbonate, or an aldehyde. In some embodiments, a nucleophile may exist on a linker and an electrophile may exist on a muscle-targeting agent or molecular payload prior to a reaction between a linker and a muscle-targeting agent or molecular payload. In some embodiments, an electrophile may exist on a linker and a nucleophile may exist on a muscle-targeting agent or molecular payload prior to a reaction between a linker and a muscle-targeting agent or molecular payload. In some embodiments, an electrophile may be an azide, a pentafluorophenyl, a silicon centers, a carbonyl, a carboxylic acid, an anhydride, an isocyanate, a thioisocyanate, a succinimidyl ester, a sulfosuccinimidyl ester, a maleimide, an alkyl halide, an alkyl pseudohalide, an epoxide, an episulfide, an aziridine, an aryl, an activated phosphorus center, and/or (e.g., and) an activated sulfur center. In some embodiments, a nucleophile may be an optionally substituted alkene, an optionally substituted alkyne, an optionally substituted aryl, an optionally substituted heterocyclyl, a hydroxyl group, an amino group, an alkylamino group, an anilido group, or a thiol group.

[0705] In some embodiments, the val-cit linker attached to a reactive chemical moiety (e.g., SPAAC for click chemistry conjugation) is conjugated to the anti-TfR antibody by a structure of:

[chemical structure]

wherein m is any number from 0-10. In some embodiments, m is 4.

[0706] In some embodiments, the val-cit linker attached to a reactive chemical moiety (e.g., SPAAC for click chemistry conjugation) is conjugated to an anti-TfR antibody having a structure of:

[chemical structure]

wherein m is any number from 0-10. In some embodiments, m is 4, wherein the NH is from an amine group of a lysine of the antibody.

[0707] In some embodiments, the val-cit linker attached to a reactive chemical moiety (e.g., SPAAC for click chemistry conjugation) and is conjugated to an anti-TfR antibody has a structure of:

[chemical structure]

wherein n is any number from 0-10, wherein m is any number from 0-10. In some embodiments, n is 3 and/or (e.g., and) m is 4.

[0708] In some embodiments, an anti-TfR antibody and a molecular payload (e.g., an oligonucleotide) is linked via a structure of:

[chemical structure]

wherein n is any number from 0-10, wherein m is any number from 0-10. In some embodiments, n is 3 and/or (e.g., and) m is 4. In some embodiments, X is NH (e.g., NH from an amine group of a lysine). In some embodiments, X is S and the antibody is linked via conjugation to a cysteine of the antibody. In some embodiments, X is O and the antibody is linked via conjugation to a hydroxyl group of a serine, threonine, or tyrosine of the antibody.

[0709] In some embodiments, the complex described herein has a structure of:

[chemical structure]

wherein n is any number from 0-10, wherein m is any number from 0-10. In some embodiments, n is 3 and/or (e.g., and) m is 4.

[0710] In structures formula (A), (B), (C), and (D), L1 is, in some embodiments, is a spacer that is substituted or unsubstituted aliphatic, substituted or unsubstituted heteroaliphatic, substituted or unsubstituted carbocyclylene, substituted or unsubstituted heterocyclylene, substituted or unsubstituted arylene, substituted or unsubstituted heteroarylene, -O-, -N(R^{A})-, -S-, -C(=O)-, -C(=O)O-, -C(=O)NR^{A}-, -NR^{A}C(=O)-, -NR^{A}C(=O)R^{A}-, -C(=O)R^{A}-, -NR^{A}C(=O)O-, -NR^{A}C(=O)N(R^{A})-, -OC(=O)-, -OC(=O)O-, -OC(=O)N(R^{A})-, -S(O)₂NR^{A}-, -NR^{A}S(O)₂-, or a combination thereof, wherein each R^{A} is independently hydrogen or substituted or unsubstituted alkyl. In some embodiments, L1 is

[chemical structure]

wherein the piperazine moiety links to the oligonucleotide, wherein L2 is

[chemical structure]

[chemical structure]

[chemical structure]

[chemical structure]

[chemical structure]

[chemical structure]

[chemical structure]

[chemical structure]

[chemical structure]

[chemical structure]

[chemical structure]

[chemical structure]

or

[chemical structure]

[0711] In some embodiments, L1 is:

[chemical structure]

wherein the piperazine links to the oligonucleotide.

[0712] In some embodiments, L1 is

[chemical structure]

[0713] In some embodiments, L1 is linked to the 5′ phosphate of the oligonucleotide. In some embodiments, L1 is linked to the 5′ phosphorothioate of the oligonucleotide. In some embodiments, L1 is linked to the 5′ phosphonoamidate of the oligonucleotide.

[0714] In some embodiments, L1 is optional (e.g., need not be present).

### D. Examples of Antibody-Molecular Payload Complexes

[0715] Other aspects of the present disclosure provide complexes comprising any one the muscle targeting agent (e.g., a transferrin receptor antibodies) described herein covalently linked to any of the molecular payloads (e.g., an oligonucleotide) described herein. In some embodiments, the muscle targeting agent (e.g., a transferrin receptor antibody) is covalently linked to a molecular payload (e.g., an oligonucleotide) via a linker. Any of the linkers described herein may be used. In some embodiments, the linker is linked to the 5′ end, the 3′ end, or internally of the oligonucleotide. In some embodiments, the linker is linked to the antibody via a thiol-reactive linkage (e.g., via a cysteine in the antibody). In some embodiments, the linker (e.g., a Val-cit linker) is linked to the antibody (e.g., an anti-TfR antibody described herein) via a n amine group (e.g., via a lysine in the antibody).

[0716] An example of a structure of a complex comprising a transferrin receptor antibody covalently linked to an oligonucleotide via a Val-cit linker is provided below:

[chemical structure]

wherein the linker is linked to the 5′ end, the 3′ end, or internally of the oligonucleotide, and wherein the linker is linked to the antibody via a thiol-reactive linkage (e.g., via a cysteine in the antibody).

[0717] Another example of a structure of a complex comprising an anti-TfR antibody covalently linked to a molecular payload via a Val-cit linker is provided below:

[chemical structure]

wherein n is a number between 0-10, wherein m is a number between 0-10, wherein the linker is linked to the antibody via an amine group (e.g., on a lysine residue), and/or (e.g., and) wherein the linker is linked to the oligonucleotide (e.g., at the 5′ end, 3′ end, or internally). In some embodiments, the linker is linked to the antibody via a lysine, the linker is linked to the oligonucleotide at the 5′ end, n is 3, and m is 4. In some embodiments, L1 is any one of the spacers described herein. In some embodiments, the oligonucleotide comprises a sense strand and an antisense strand, and, the linker is linked to the sense strand or the antisense strand at the 5′ end or the 3′ end. It should be appreciated that antibodies can be linked to oligonucleotides with different stochiometries, a property that may be referred to as a drug to antibody ratios (DAR) with the “drug” being the oligonucleotide. In some embodiments, one oligonucleotide is linked to an antibody (DAR = 1). In some embodiments, two oligonucleotides are linked to an antibody (DAR = 2). In some embodiments, three oligonucleotides are linked to an antibody (DAR = 3). In some embodiments, four oligonucleotides are linked to an antibody (DAR = 4). In some embodiments, a mixture of different complexes, each having a different DAR, is provided. In some embodiments, an average DAR of complexes in such a mixture may be in a range of 1 to 3, 1 to 4, 1 to 5 or more. DAR may be increased by conjugating oligonucleotides to different sites on an antibody and/or (e.g., and) by conjugating multimers to one or more sites on antibody. For example, a DAR of 2 may be achieved by conjugating a single oligonucleotide to two different sites on an antibody or by conjugating a dimer oligonucleotide to a single site of an antibody.

[0718] In some embodiments, the complex described herein comprises a transferrin receptor antibody (e.g., an antibody or any variant thereof as described herein) covalently linked to an oligonucleotide. In some embodiments, the complex described herein comprises a transferrin receptor antibody (e.g., an antibody or any variant thereof as described herein) covalently linked to an oligonucleotide via a linker (e.g., a Val-cit linker). In some embodiments, the linker (e.g., a Val-cit linker) is linked to the 5′ end, the 3′ end, or internally of the oligonucleotide. In some embodiments, the linker (e.g., a Val-cit linker) is linked to the antibody (e.g., an antibody or any variant thereof as described herein) via a thiol-reactive linkage (e.g., via a cysteine in the antibody). In some embodiments, the linker (e.g., a Val-cit linker) is linked to the antibody (e.g., an anti-TfR antibody described herein) via an amine group (e.g., via a lysine in the antibody).

[0719] In some embodiments, the complex described herein comprises an anti-TfR antibody covalently linked to a molecular payload (e.g., an oligonucleotide), wherein the anti-TfR antibody comprises a CDR-H1, a CDR-H2, and a CDR-H3 that are the same as the CDR-H1, CDR-H2, and CDR-H3 shown in Table 2, Table 4, Table 7, or Table 9; and a CDR-L1, a CDR-L2, and a CDR-L3 that are the same as the CDR-L1, CDR-L2, and CDR-L3 shown in Table 2, Table 4, Table 7, or Table 9.

[0720] In some embodiments, the complex described herein comprises an anti-TfR antibody covalently linked to a molecular payload (e.g., an oligonucleotide), wherein the anti-TfR antibody comprises:
[0721] (i) a CDR-H1 of SEQ ID NO: 1, a CDR-H2 of SEQ ID NO: 2, SEQ ID NO: 262, or SEQ ID NO: 80, a CDR-H3 of SEQ ID NO: 3, a CDR-L1 of SEQ ID NO: 4, a CDR-L2 of SEQ ID NO: 5, and a CDR-L3 of SEQ ID NO: 6;
[0722] (ii) a CDR-H1 of SEQ ID NO: 145, a CDR-H2 of SEQ ID NO: 146, SEQ ID NO: 263, or SEQ ID NO: 265, a CDR-H3 of SEQ ID NO: 147, a CDR-L1 of SEQ ID NO: 148, a CDR-L2 of SEQ ID NO: 149, and a CDR-L3 of SEQ ID NO: 6; or
[0723] (iii) a CDR-H1 of SEQ ID NO: 150, a CDR-H2 of SEQ ID NO: 151, SEQ ID NO: 270, or SEQ ID NO: 271, a CDR-H3 of SEQ ID NO: 152, a CDR-L1 of SEQ ID NO: 153, a CDR-L2 of SEQ ID NO: 5, and a CDR-L3 of SEQ ID NO: 154. In some embodiments, the molecular payload is an oligonucleotide comprising a strand that comprises a sequence as set forth in any one of SEQ ID NOs: 259-261, 309-12147, and 12172- 28939. In some embodiments, the molecular payload is an oligonucleotide comprising a strand having a region of complementarity of at least 8 nucleotides in length to a sequence as set forth in SEQ ID NO: 6240-12147, 12172-19511, and 26852-27896.

[0724] In some embodiments, the complex described herein comprises an anti-TfR antibody covalently linked to a molecular payload (e.g., an oligonucleotide), wherein the anti-TfR antibody comprises:
[0725] (i) a CDR-H1 of SEQ ID NO: 9, a CDR-H2 of SEQ ID NO: 10, a CDR-H3 of SEQ ID NO: 11, a CDR-L1 of SEQ ID NO: 12, a CDR-L2 of SEQ ID NO: 13, and a CDR-L3 of SEQ ID NO: 14;
[0726] (ii) a CDR-H1 of SEQ ID NO: 155, a CDR-H2 of SEQ ID NO: 156, a CDR-H3 of SEQ ID NO: 157, a CDR-L1 of SEQ ID NO: 158, a CDR-L2 of SEQ ID NO: 159, and a CDR-L3 of SEQ ID NO: 14; or
[0727] (iii) a CDR-H1 of SEQ ID NO: 160, a CDR-H2 of SEQ ID NO: 161, a CDR-H3 of SEQ ID NO: 162, a CDR-L1 of SEQ ID NO: 163, a CDR-L2 of SEQ ID NO: 13, and a CDR-L3 of SEQ ID NO: 164. In some embodiments, the molecular payload is an oligonucleotide comprising a strand that comprises a sequence as set forth in any one of SEQ ID NOs: 259-261, 309-12147, and 12172- 28939. In some embodiments, the molecular payload is an oligonucleotide comprising a strand having a region of complementarity of at least 8 nucleotides in length to a sequence as set forth in SEQ ID NO: 6240-12147, 12172-19511, and 26852-27896.

[0728] In some embodiments, the complex described herein comprises an anti-TfR antibody covalently linked to a molecular payload (e.g., an oligonucleotide), wherein the anti-TfR antibody comprises:
[0729] (i) a CDR-H1 of SEQ ID NO: 17, SEQ ID NO: 266, or SEQ ID NO: 268, a CDR-H2 of SEQ ID NO: 18, a CDR-H3 of SEQ ID NO: 19, a CDR-L1 of SEQ ID NO: 20, a CDR-L2 of SEQ ID NO: 21, and a CDR-L3 of SEQ ID NO: 22;
[0730] (ii) a CDR-H1 of SEQ ID NO: 165, SEQ ID NO: 267, or SEQ ID NO: 269, a CDR-H2 of SEQ ID NO: 166, a CDR-H3 of SEQ ID NO: 167, a CDR-L1 of SEQ ID NO: 168, a CDR-L2 of SEQ ID NO: 169, and a CDR-L3 of SEQ ID NO: 22; or
[0731] (iii) a CDR-H1 of SEQ ID NO: 170, a CDR-H2 of SEQ ID NO: 171, a CDR-H3 of SEQ ID NO: 172, a CDR-L1 of SEQ ID NO: 173, a CDR-L2 of SEQ ID NO: 21, and a CDR-L3 of SEQ ID NO: 174. In some embodiments, the molecular payload is an oligonucleotide comprising a strand that comprises a sequence as set forth in any one of SEQ ID NOs: 259-261, 309-12147, and 12172- 28939. In some embodiments, the molecular payload is an oligonucleotide comprising a strand having a region of complementarity of at least 8 nucleotides in length to a sequence as set forth in SEQ ID NO: 6240-12147, 12172-19511, and 26852-27896.

[0732] In some embodiments, the complex described herein comprises an anti-TfR antibody covalently linked to a molecular payload (e.g., an oligonucleotide), wherein the anti-TfR antibody comprises:
[0733] (i) a CDR-H1 of SEQ ID NO: 188, a CDR-H2 of SEQ ID NO: 189, a CDR-H3 of SEQ ID NO: 190, a CDR-L1 of SEQ ID NO: 191, a CDR-L2 of SEQ ID NO: 192, and a CDR-L3 of SEQ ID NO: 193;
[0734] (ii) a CDR-H1 of SEQ ID NO: 194, a CDR-H2 of SEQ ID NO: 195, a CDR-H3 of SEQ ID NO: 196, a CDR-L1 of SEQ ID NO: 197, a CDR-L2 of SEQ ID NO: 198, and a CDR-L3 of SEQ ID NO: 193; or
[0735] (iii) a CDR-H1 of SEQ ID NO: 199, a CDR-H2 of SEQ ID NO: 200, a CDR-H3 of SEQ ID NO: 201, a CDR-L1 of SEQ ID NO: 202, a CDR-L2 of SEQ ID NO: 192, and a CDR-L3 of SEQ ID NO: 203. In some embodiments, the molecular payload is an oligonucleotide comprising a strand that comprises a sequence as set forth in any one of SEQ ID NOs: 259-261, 309-12147, and 12172- 28939. In some embodiments, the molecular payload is an oligonucleotide comprising a strand having a region of complementarity of at least 8 nucleotides in length to a sequence as set forth in SEQ ID NO: 6240-12147, 12172-19511, and 26852-27896.

[0736] In some embodiments, the complex described herein comprises an anti-TfR antibody covalently linked to a molecular payload (e.g., an oligonucleotide), wherein the anti-TfR antibody comprises VH as shown in Table 2 or Table 7; and a VL as shown in Table 2 or Table 7. In some embodiments, the molecular payload is an oligonucleotide comprising a strand that comprises a sequence as set forth in any one of SEQ ID NOs: 259-261, 309-12147, and 12172- 28939. In some embodiments, the molecular payload is an oligonucleotide comprising a strand having a region of complementarity of at least 8 nucleotides in length to a sequence as set forth in SEQ ID NO: 6240-12147, 12172-19511, and 26852-27896.

[0737] In some embodiments, the complex described herein comprises an anti-TfR antibody covalently linked to a molecular payload (e.g., an oligonucleotide), wherein the anti-TfR antibody comprises a VH having the amino acid sequence of SEQ ID NO: 7 and a VL having the amino acid sequence of SEQ ID NO: 8. In some embodiments, the molecular payload is an oligonucleotide comprising a strand that comprises a sequence as set forth in any one of SEQ ID NOs: 259-261, 309-12147, and 12172- 28939. In some embodiments, the molecular payload is an oligonucleotide comprising a strand having a region of complementarity of at least 8 nucleotides in length to a sequence as set forth in SEQ ID NO: 6240-12147, 12172-19511, and 26852-27896.

[0738] In some embodiments, the complex described herein comprises an anti-TfR antibody covalently linked to a molecular payload (e.g., an oligonucleotide), wherein the anti-TfR antibody comprises a VH having the amino acid sequence of SEQ ID NO: 15 and a VL having the amino acid sequence of SEQ ID NO: 16. In some embodiments, the molecular payload is an oligonucleotide comprising a strand that comprises a sequence as set forth in any one of SEQ ID NOs: 259-261, 309-12147, and 12172- 28939. In some embodiments, the molecular payload is an oligonucleotide comprising a strand having a region of complementarity of at least 8 nucleotides in length to a sequence as set forth in SEQ ID NO: 6240-12147, 12172-19511, and 26852-27896.

[0739] In some embodiments, the complex described herein comprises an anti-TfR antibody covalently linked to a molecular payload (e.g., an oligonucleotide), wherein the anti-TfR antibody comprises a VH having the amino acid sequence of SEQ ID NO: 23 and a VL having the amino acid sequence of SEQ ID NO: 24. In some embodiments, the molecular payload is an oligonucleotide comprising a strand that comprises a sequence as set forth in any one of SEQ ID NOs: 259-261, 309-12147, and 12172- 28939. In some embodiments, the molecular payload is an oligonucleotide comprising a strand having a region of complementarity of at least 8 nucleotides in length to a sequence as set forth in SEQ ID NO: 6240-12147, 12172-19511, and 26852-27896.

[0740] In some embodiments, the complex described herein comprises an anti-TfR antibody covalently linked to a molecular payload (e.g., an oligonucleotide), wherein the anti-TfR antibody comprises a VH having the amino acid sequence of SEQ ID NO: 204 and a VL having the amino acid sequence of SEQ ID NO: 205. In some embodiments, the molecular payload is an oligonucleotide comprising a strand that comprises a sequence as set forth in any one of SEQ ID NOs: 259-261, 309-12147, and 12172- 28939. In some embodiments, the molecular payload is an oligonucleotide comprising a strand having a region of complementarity of at least 8 nucleotides in length to a sequence as set forth in SEQ ID NO: 6240-12147, 12172-19511, and 26852-27896.

[0741] In some embodiments, the complex described herein comprises an anti-TfR antibody covalently linked to a molecular payload (e.g., an oligonucleotide), wherein the anti-TfR antibody comprises a heavy chain having the amino acid sequence of SEQ ID NO: 178, SEQ ID NO: 185, SEQ ID NO: 300, SEQ ID NO: 301, SEQ ID NO: 304, or SEQ ID NO: 305, and a light chain having the amino acid sequence of SEQ ID NO: 179. In some embodiments, the molecular payload is an oligonucleotide comprising a strand that comprises a sequence as set forth in any one of SEQ ID NOs: 259-261, 309-12147, and 12172- 28939. In some embodiments, the molecular payload is an oligonucleotide comprising a strand having a region of complementarity of at least 8 nucleotides in length to a sequence as set forth in SEQ ID NO: 6240-12147, 12172-19511, and 26852-27896.

[0742] In some embodiments, the complex described herein comprises an anti-TfR antibody covalently linked to a molecular payload (e.g., an oligonucleotide) wherein the anti-TfR antibody comprises a heavy chain having the amino acid sequence of SEQ ID NO: 180, SEQ ID NO: 186, and a light chain having the amino acid sequence of SEQ ID NO: 181. In some embodiments, the molecular payload is an oligonucleotide comprising a strand that comprises a sequence as set forth in any one of SEQ ID NOs: 259-261, 309-12147, and 12172-28939. In some embodiments, the molecular payload is an oligonucleotide comprising a strand having a region of complementarity of at least 8 nucleotides in length to a sequence as set forth in SEQ ID NO: 6240-12147, 12172-19511, and 26852-27896.

[0743] In some embodiments, the complex described herein comprises an anti-TfR antibody covalently linked to a molecular payload (e.g., an oligonucleotide), wherein the anti-TfR antibody comprises a heavy chain having the amino acid sequence of SEQ ID NO: 182, SEQ ID NO: 187, SEQ ID NO: 302, SEQ ID NO: 303, SEQ ID NO: 306, or SEQ ID NO: 307, and a light chain having the amino acid sequence of SEQ ID NO: 183. In some embodiments, the molecular payload is an oligonucleotide comprising a strand that comprises a sequence as set forth in any one of SEQ ID NOs: 259-261, 309-12147, and 12172- 28939. In some embodiments, the molecular payload is an oligonucleotide comprising a strand having a region of complementarity of at least 8 nucleotides in length to a sequence as set forth in SEQ ID NO: 6240-12147, 12172-19511, and 26852-27896.

[0744] In some embodiments, the complex described herein comprises an anti-TfR antibody covalently linked to a molecular payload (e.g., an oligonucleotide), wherein the anti-TfR antibody comprises a heavy chain having the amino acid sequence of SEQ ID NO: 210, SEQ ID NO: 211, SEQ ID NO: 213, or SEQ ID NO: 308, and a light chain having the amino acid sequence of SEQ ID NO: 212. In some embodiments, the molecular payload is an oligonucleotide comprising a strand that comprises a sequence as set forth in any one of SEQ ID NOs: 259-261, 309-12147, and 12172- 28939. In some embodiments, the molecular payload is an oligonucleotide comprising a strand having a region of complementarity of at least 8 nucleotides in length to a sequence as set forth in SEQ ID NO: 6240-12147, 12172-19511, and 26852-27896.

[0745] In some embodiments, the complex described herein comprises an anti-TfR antibody covalently linked to a molecular payload, wherein the antibody is a humanized antibody that comprises a VH that contains human framework regions with the CDR-H1, CDR-H2, and CDR-H3 of a murine antibody listed in Table 2 or Table 4 (e.g., 3A4, 3M12, or 5H12), and a VL that contains human framework regions with the CDR-L1, CDR-L2, and CDR-L3 of a murine antibody listed in Table 2 or Table 4 (e.g., 3A4, 3M12, or 5H12). In some embodiments, the molecular payload is an oligonucleotide comprising a strand that comprises a sequence as set forth in any one of SEQ ID NOs: 259-261, 309-12147, and 12172-28939. In some embodiments, the molecular payload is an oligonucleotide comprising a strand having a region of complementarity of at least 8 nucleotides in length to a sequence as set forth in SEQ ID NO: 6240-12147, 12172-19511, and 26852-27896.

[0746] In some embodiments, the complex described herein comprises an anti-TfR antibody covalently linked to a molecular payload, wherein the antibody comprises a VH that contains human framework regions with the CDR-H1, CDR-H2, and CDR-H3 of a VH as set forth in SEQ ID NO: 7, and a VL that contains human framework regions with the CDR-L1, CDR-L2, and CDR-L3 of a VL as forth in SEQ ID NO: 8. In some embodiments, the molecular payload is an oligonucleotide comprising a strand that comprises a sequence as set forth in any one of SEQ ID NOs: 259-261, 309-12147, and 12172- 28939. In some embodiments, the molecular payload is an oligonucleotide comprising a strand having a region of complementarity of at least 8 nucleotides in length to a sequence as set forth in SEQ ID NO: 6240-12147, 12172-19511, and 26852-27896.

[0747] In some embodiments, the complex described herein comprises an anti-TfR antibody covalently linked to a molecular payload, wherein the antibody comprises a VH that contains human framework regions with the CDR-H1, CDR-H2, and CDR-H3 of a VH as set forth in SEQ ID NO: 15, and a VL that contains human framework regions with the CDR-L1, CDR-L2, and CDR-L3 of a VL as forth in SEQ ID NO: 16. In some embodiments, the molecular payload is an oligonucleotide comprising a strand that comprises a sequence as set forth in any one of SEQ ID NOs: 259-261, 309-12147, and 12172- 28939. In some embodiments, the molecular payload is an oligonucleotide comprising a strand having a region of complementarity of at least 8 nucleotides in length to a sequence as set forth in SEQ ID NO: 6240-12147, 12172-19511, and 26852-27896.

[0748] In some embodiments, the complex described herein comprises an anti-TfR antibody covalently linked to a molecular payload, wherein the antibody comprises a VH that contains human framework regions with the CDR-H1, CDR-H2, and CDR-H3 of a VH as set forth in SEQ ID NO: 23, and a VL that contains human framework regions with the CDR-L1, CDR-L2, and CDR-L3 of a VL as forth in SEQ ID NO: 24. In some embodiments, the molecular payload is an oligonucleotide comprising a strand that comprises a sequence as set forth in any one of SEQ ID NOs: 259-261, 309-12147, and 12172- 28939. In some embodiments, the molecular payload is an oligonucleotide comprising a strand having a region of complementarity of at least 8 nucleotides in length to a sequence as set forth in SEQ ID NO: 6240-12147, 12172-19511, and 26852-27896.

[0749] In some embodiments, the complex described herein comprises an anti-TfR antibody covalently linked to a molecular payload, wherein the antibody is an IgG1 kappa that comprises human framework regions with the CDRs of a murine antibody listed in Table 2 or Table 4 (e.g., 3A4, 3M12, or 5H12). In some embodiments, the molecular payload is an oligonucleotide comprising a strand that comprises a sequence as set forth in any one of SEQ ID NOs: 259-261, 309-12147, and 12172- 28939. In some embodiments, the molecular payload is an oligonucleotide comprising a strand having a region of complementarity of at least 8 nucleotides in length to a sequence as set forth in SEQ ID NO: 6240-12147, 12172-19511, and 26852-27896.

[0750] In some embodiments, the complex described herein comprises an anti-TfR antibody covalently linked to a molecular payload, wherein the antibody is a Fab′ fragment of an IgG1 kappa that comprises human framework regions with the CDRs of a murine antibody listed in Table 2 or Table 4 (e.g., 3A4, 3M12, or 5H12). In some embodiments, the molecular payload is an oligonucleotide comprising a strand that comprises a sequence as set forth in any one of SEQ ID NOs: 259-261, 309-12147, and 12172- 28939. In some embodiments, the molecular payload is an oligonucleotide comprising a strand having a region of complementarity of at least 8 nucleotides in length to a sequence as set forth in SEQ ID NO: 6240-12147, 12172-19511, and 26852-27896.

[0751] In some embodiments, the complex described herein comprises an anti-TfR antibody covalently linked to a molecular payload, wherein the antibody is a Fab′ fragment of an IgG1 kappa that comprises human framework regions with the CDRs of a murine antibody listed in Table 2 or Table 4 (e.g., 3A4, 3M12, or 5H12). In some embodiments, the molecular payload is an oligonucleotide comprising a strand that comprises a sequence as set forth in any one of SEQ ID NOs: 259-261, 309-12147, and 12172- 28939. In some embodiments, the molecular payload is an oligonucleotide comprising a strand having a region of complementarity of at least 8 nucleotides in length to a sequence as set forth in SEQ ID NO: 6240-12147, 12172-19511, and 26852-27896.

[0752] In some embodiments, the complex described herein comprises an anti-TfR antibody covalently linked via a lysine to the 5′ end of an oligonucleotide, wherein the antibody is a Fab′ fragment of an IgG1 kappa that comprises human framework regions with the CDRs of a murine antibody listed in Table 2 or Table 4 (e.g., 3A4, 3M12, or 5H12), wherein the complex has the structure of:

[chemical structure]

wherein n is 3 and m is 4. In some embodiments, the molecular payload is an oligonucleotide comprising a strand that comprises a sequence as set forth in any one of SEQ ID NOs: 259-261, 309-12147, and 12172- 28939. In some embodiments, the molecular payload is an oligonucleotide comprising a strand having a region of complementarity of at least 8 nucleotides in length to a sequence as set forth in SEQ ID NO: 6240-12147, 12172-19511, and 26852-27896.

[0753] In some embodiments, the complex described herein comprises an anti-TfR antibody covalently linked via a lysine to the 5′ end of an oligonucleotide, wherein the antibody is a Fab′ fragment of an IgG1 kappa that comprises a heavy chain comprising the amino acid sequence of SEQ ID NO: 308 and a light chain comprising the amino acid sequence of SEQ ID NO: 212, wherein the complex has the structure of:

[chemical structure]

wherein n is 3 and m is 4. In some embodiments, the molecular payload is an oligonucleotide comprising a strand that comprises a sequence as set forth in any one of SEQ ID NOs: 259-261, 309-12147, and 12172- 28939. In some embodiments, the molecular payload is an oligonucleotide comprising a strand having a region of complementarity of at least 8 nucleotides in length to a sequence as set forth in SEQ ID NO: 6240-12147, 12172-19511, and 26852-27896.

[0754] In some embodiments, the complex described herein comprises an anti-TfR antibody covalently linked via a lysine to the 5′ end of an oligonucleotide, wherein the antibody is a Fab′ fragment of an IgG1 kappa that comprises a heavy chain comprising the amino acid sequence of SEQ ID NO: 213 and a light chain comprising the amino acid sequence of SEQ ID NO: 212, wherein the complex has the structure of:

[chemical structure]

wherein n is 3 and m is 4. In some embodiments, the molecular payload is an oligonucleotide comprising a strand that comprises a sequence as set forth in any one of SEQ ID NOs: 259-261, 309-12147, and 12172- 28939. In some embodiments, the molecular payload is an oligonucleotide comprising a strand having a region of complementarity of at least 8 nucleotides in length to a sequence as set forth in SEQ ID NO: 6240-12147, 12172-19511, and 26852-27896.

[0755] In some embodiments, the complex described herein comprises an anti-TfR Fab covalently linked via a lysine to the 5′ end of an oligonucleotide (e.g., an oligonucleotide targeting a muscle disease gene listed in Table 1), wherein the anti-TfR Fab comprises a CDR-H1 as set forth in SEQ ID NO: 1, a CDR-H2 as set forth in SEQ ID NO: 2, a CDR-H3 as set forth in SEQ ID NO: 3, a CDR-L1 as set forth in SEQ ID NO: 4, a CDR-L2 as set forth in SEQ ID NO: 5, and a CDR-L3 as set forth in SEQ ID NO: 6; wherein the complex has the structure of:

[chemical structure]

wherein n is 3 and m is 4. In some embodiments, the molecular payload is an oligonucleotide comprising a strand that comprises a sequence as set forth in any one of SEQ ID NOs: 259-261, 309-12147, and 12172- 28939. In some embodiments, the molecular payload is an oligonucleotide comprising a strand having a region of complementarity of at least 8 nucleotides in length to a sequence as set forth in SEQ ID NO: 6240-12147, 12172-19511, and 26852-27896.

[0756] In some embodiments, the complex described herein comprises an anti-TfR Fab covalently linked via a lysine to the 5′ end of an oligonucleotide (e.g., an oligonucleotide targeting a muscle disease gene listed in Table 1), wherein the anti-TfR Fab comprises a CDR-H1 as set forth in SEQ ID NO: 1, a CDR-H2 as set forth in SEQ ID NO: 262, a CDR-H3 as set forth in SEQ ID NO: 3, a CDR-L1 as set forth in SEQ ID NO: 4, a CDR-L2 as set forth in SEQ ID NO: 5, and a CDR-L3 as set forth in SEQ ID NO: 6; wherein the complex has the structure of:

[chemical structure]

wherein n is 3 and m is 4. In some embodiments, the molecular payload is an oligonucleotide comprising a strand that comprises a sequence as set forth in any one of SEQ ID NOs: 259-261, 309-12147, and 12172- 28939. In some embodiments, the molecular payload is an oligonucleotide comprising a strand having a region of complementarity of at least 8 nucleotides in length to a sequence as set forth in SEQ ID NO: 6240-12147, 12172-19511, and 26852-27896.

[0757] In some embodiments, the complex described herein comprises an anti-TfR Fab covalently linked via a lysine to the 5′ end of an oligonucleotide (e.g., an oligonucleotide targeting a muscle disease gene listed in Table 1), wherein the anti-TfR Fab comprises a CDR-H1 as set forth in SEQ ID NO: 1, a CDR-H2 as set forth in SEQ ID NO: 80, a CDR-H3 as set forth in SEQ ID NO: 3, a CDR-L1 as set forth in SEQ ID NO: 4, a CDR-L2 as set forth in SEQ ID NO: 5, and a CDR-L3 as set forth in SEQ ID NO: 6; wherein the complex has the structure of:

[chemical structure]

wherein n is 3 and m is 4. In some embodiments, the molecular payload is an oligonucleotide comprising a strand that comprises a sequence as set forth in any one of SEQ ID NOs: 259-261, 309-12147, and 12172- 28939. In some embodiments, the molecular payload is an oligonucleotide comprising a strand having a region of complementarity of at least 8 nucleotides in length to a sequence as set forth in SEQ ID NO: 6240-12147, 12172-19511, and 26852-27896.

[0758] In some embodiments, the complex described herein comprises an anti-TfR Fab covalently linked via a lysine to the 5′ end of an oligonucleotide (e.g., an oligonucleotide targeting a muscle disease gene listed in Table 1), wherein the anti-TfR Fab comprises a CDR-H1 as set forth in SEQ ID NO: 145, a CDR-H2 as set forth in SEQ ID NO: 146, a CDR-H3 as set forth in SEQ ID NO: 147, a CDR-L1 as set forth in SEQ ID NO: 148, a CDR-L2 as set forth in SEQ ID NO: 149, and a CDR-L3 as set forth in SEQ ID NO: 6; wherein the complex has the structure of:

[chemical structure]

wherein n is 3 and m is 4. In some embodiments, the molecular payload is an oligonucleotide comprising a strand that comprises a sequence as set forth in any one of SEQ ID NOs: 259-261, 309-12147, and 12172- 28939. In some embodiments, the molecular payload is an oligonucleotide comprising a strand having a region of complementarity of at least 8 nucleotides in length to a sequence as set forth in SEQ ID NO: 6240-12147, 12172-19511, and 26852-27896. In some embodiments, the complex described herein comprises an anti-TfR Fab covalently linked via a lysine to the 5′ end of an oligonucleotide (e.g., an oligonucleotide targeting a muscle disease gene listed in Table 1), wherein the anti-TfR Fab comprises a CDR-H1 as set forth in SEQ ID NO: 145, a CDR-H2 as set forth in SEQ ID NO: 263, a CDR-H3 as set forth in SEQ ID NO: 147, a CDR-L1 as set forth in SEQ ID NO: 148, a CDR-L2 as set forth in SEQ ID NO: 149, and a CDR-L3 as set forth in SEQ ID NO: 6; wherein the complex has the structure of:

[chemical structure]

wherein n is 3 and m is 4. In some embodiments, the molecular payload is an oligonucleotide comprising a strand that comprises a sequence as set forth in any one of SEQ ID NOs: 259-261, 309-12147, and 12172- 28939. In some embodiments, the molecular payload is an oligonucleotide comprising a strand having a region of complementarity of at least 8 nucleotides in length to a sequence as set forth in SEQ ID NO: 6240-12147, 12172-19511, and 26852-27896.

[0759] In some embodiments, the complex described herein comprises an anti-TfR Fab covalently linked via a lysine to the 5′ end of an oligonucleotide (e.g., an oligonucleotide targeting a muscle disease gene listed in Table 1), wherein the anti-TfR Fab comprises a CDR-H1 as set forth in SEQ ID NO: 145, a CDR-H2 as set forth in SEQ ID NO: 265, a CDR-H3 as set forth in SEQ ID NO: 147, a CDR-L1 as set forth in SEQ ID NO: 148, a CDR-L2 as set forth in SEQ ID NO: 149, and a CDR-L3 as set forth in SEQ ID NO: 6; wherein the complex has the structure of:

[chemical structure]

wherein n is 3 and m is 4. In some embodiments, the molecular payload is an oligonucleotide comprising a strand that comprises a sequence as set forth in any one of SEQ ID NOs: 259-261, 309-12147, and 12172- 28939. In some embodiments, the molecular payload is an oligonucleotide comprising a strand having a region of complementarity of at least 8 nucleotides in length to a sequence as set forth in SEQ ID NO: 6240-12147, 12172-19511, and 26852-27896.

[0760] In some embodiments, the complex described herein comprises an anti-TfR Fab covalently linked via a lysine to the 5′ end of an oligonucleotide (e.g., an oligonucleotide targeting a muscle disease gene listed in Table 1), wherein the anti-TfR Fab comprises a CDR-H1 as set forth in SEQ ID NO: 150, a CDR-H2 as set forth in SEQ ID NO: 151, a CDR-H3 as set forth in SEQ ID NO: 152, a CDR-L1 as set forth in SEQ ID NO: 153, a CDR-L2 as set forth in SEQ ID NO: 5, and a CDR-L3 as set forth in SEQ ID NO: 154; wherein the complex has the structure of:

[chemical structure]

wherein n is 3 and m is 4. In some embodiments, the molecular payload is an oligonucleotide comprising a strand that comprises a sequence as set forth in any one of SEQ ID NOs: 259-261, 309-12147, and 12172- 28939. In some embodiments, the molecular payload is an oligonucleotide comprising a strand having a region of complementarity of at least 8 nucleotides in length to a sequence as set forth in SEQ ID NO: 6240-12147, 12172-19511, and 26852-27896.

[0761] In some embodiments, the complex described herein comprises an anti-TfR Fab covalently linked via a lysine to the 5′ end of an oligonucleotide (e.g., an oligonucleotide targeting a muscle disease gene listed in Table 1), wherein the anti-TfR Fab comprises a CDR-H1 as set forth in SEQ ID NO: 150, a CDR-H2 as set forth in SEQ ID NO: 270, a CDR-H3 as set forth in SEQ ID NO: 152, a CDR-L1 as set forth in SEQ ID NO: 153, a CDR-L2 as set forth in SEQ ID NO: 5, and a CDR-L3 as set forth in SEQ ID NO: 154; wherein the complex has the structure of:

[chemical structure]

wherein n is 3 and m is 4. In some embodiments, the molecular payload is an oligonucleotide comprising a strand that comprises a sequence as set forth in any one of SEQ ID NOs: 259-261, 309-12147, and 12172- 28939. In some embodiments, the molecular payload is an oligonucleotide comprising a strand having a region of complementarity of at least 8 nucleotides in length to a sequence as set forth in SEQ ID NO: 6240-12147, 12172-19511, and 26852-27896.

[0762] In some embodiments, the complex described herein comprises an anti-TfR Fab covalently linked via a lysine to the 5′ end of an oligonucleotide (e.g., an oligonucleotide targeting a muscle disease gene listed in Table 1), wherein the anti-TfR Fab comprises a CDR-H1 as set forth in SEQ ID NO: 150, a CDR-H2 as set forth in SEQ ID NO: 271, a CDR-H3 as set forth in SEQ ID NO: 152, a CDR-L1 as set forth in SEQ ID NO: 153, a CDR-L2 as set forth in SEQ ID NO: 5, and a CDR-L3 as set forth in SEQ ID NO: 154; wherein the complex has the structure of:

[chemical structure]

wherein n is 3 and m is 4. In some embodiments, the molecular payload is an oligonucleotide comprising a strand that comprises a sequence as set forth in any one of SEQ ID NOs: 259-261, 309-12147, and 12172- 28939. In some embodiments, the molecular payload is an oligonucleotide comprising a strand having a region of complementarity of at least 8 nucleotides in length to a sequence as set forth in SEQ ID NO: 6240-12147, 12172-19511, and 26852-27896.

[0763] In some embodiments, the complex described herein comprises an anti-TfR Fab covalently linked via a lysine to the 5′ end of an oligonucleotide (e.g., an oligonucleotide targeting a muscle disease gene listed in Table 1), wherein the anti-TfR Fab comprises a CDR-H1 as set forth in SEQ ID NO: 9, a CDR-H2 as set forth in SEQ ID NO: 10, a CDR-H3 as set forth in SEQ ID NO: 11, a CDR-L1 as set forth in SEQ ID NO: 12, a CDR-L2 as set forth in SEQ ID NO: 13, and a CDR-L3 as set forth in SEQ ID NO: 14; wherein the complex has the structure of:

[chemical structure]

wherein n is 3 and m is 4. In some embodiments, the molecular payload is an oligonucleotide comprising a strand that comprises a sequence as set forth in any one of SEQ ID NOs: 259-261, 309-12147, and 12172- 28939. In some embodiments, the molecular payload is an oligonucleotide comprising a strand having a region of complementarity of at least 8 nucleotides in length to a sequence as set forth in SEQ ID NO: 6240-12147, 12172-19511, and 26852-27896.

[0764] In some embodiments, the complex described herein comprises an anti-TfR Fab covalently linked via a lysine to the 5′ end of an oligonucleotide (e.g., an oligonucleotide targeting a muscle disease gene listed in Table 1), wherein the anti-TfR Fab comprises a CDR-H1 as set forth in SEQ ID NO: 155, a CDR-H2 as set forth in SEQ ID NO: 156, a CDR-H3 as set forth in SEQ ID NO: 157, a CDR-L1 as set forth in SEQ ID NO: 158, a CDR-L2 as set forth in SEQ ID NO: 159, and a CDR-L3 as set forth in SEQ ID NO: 14; wherein the complex has the structure of:

[chemical structure]

wherein n is 3 and m is 4. In some embodiments, the molecular payload is an oligonucleotide comprising a strand that comprises a sequence as set forth in any one of SEQ ID NOs: 259-261, 309-12147, and 12172- 28939. In some embodiments, the molecular payload is an oligonucleotide comprising a strand having a region of complementarity of at least 8 nucleotides in length to a sequence as set forth in SEQ ID NO: 6240-12147, 12172-19511, and 26852-27896.

[0765] In some embodiments, the complex described herein comprises an anti-TfR Fab covalently linked via a lysine to the 5′ end of an oligonucleotide (e.g., an oligonucleotide targeting a muscle disease gene listed in Table 1), wherein the anti-TfR Fab comprises a CDR-H1 as set forth in SEQ ID NO: 160, a CDR-H2 as set forth in SEQ ID NO: 161, a CDR-H3 as set forth in SEQ ID NO: 162, a CDR-L1 as set forth in SEQ ID NO: 163, a CDR-L2 as set forth in SEQ ID NO: 13, and a CDR-L3 as set forth in SEQ ID NO: 164; wherein the complex has the structure of:

[chemical structure]

wherein n is 3 and m is 4. In some embodiments, the molecular payload is an oligonucleotide comprising a strand that comprises a sequence as set forth in any one of SEQ ID NOs: 259-261, 309-12147, and 12172- 28939. In some embodiments, the molecular payload is an oligonucleotide comprising a strand having a region of complementarity of at least 8 nucleotides in length to a sequence as set forth in SEQ ID NO: 6240-12147, 12172-19511, and 26852-27896.

[0766] In some embodiments, the complex described herein comprises an anti-TfR Fab covalently linked via a lysine to the 5′ end of an oligonucleotide (e.g., an oligonucleotide targeting a muscle disease gene listed in Table 1), wherein the anti-TfR Fab comprises a CDR-H1 as set forth in SEQ ID NO: 17, a CDR-H2 as set forth in SEQ ID NO: 18, a CDR-H3 as set forth in SEQ ID NO: 19, a CDR-L1 as set forth in SEQ ID NO: 20, a CDR-L2 as set forth in SEQ ID NO: 21, and a CDR-L3 as set forth in SEQ ID NO: 22; wherein the complex has the structure of:

[chemical structure]

wherein n is 3 and m is 4. In some embodiments, the molecular payload is an oligonucleotide comprising a strand that comprises a sequence as set forth in any one of SEQ ID NOs: 259-261, 309-12147, and 12172- 28939. In some embodiments, the molecular payload is an oligonucleotide comprising a strand having a region of complementarity of at least 8 nucleotides in length to a sequence as set forth in SEQ ID NO: 6240-12147, 12172-19511, and 26852-27896.

[0767] In some embodiments, the complex described herein comprises an anti-TfR Fab covalently linked via a lysine to the 5′ end of an oligonucleotide (e.g., an oligonucleotide targeting a muscle disease gene listed in Table 1), wherein the anti-TfR Fab comprises a CDR-H1 as set forth in SEQ ID NO: 266, a CDR-H2 as set forth in SEQ ID NO: 18, a CDR-H3 as set forth in SEQ ID NO: 19, a CDR-L1 as set forth in SEQ ID NO: 20, a CDR-L2 as set forth in SEQ ID NO: 21, and a CDR-L3 as set forth in SEQ ID NO: 22; wherein the complex has the structure of:

[chemical structure]

wherein n is 3 and m is 4. In some embodiments, the molecular payload is an oligonucleotide comprising a strand that comprises a sequence as set forth in any one of SEQ ID NOs: 259-261, 309-12147, and 12172- 28939. In some embodiments, the molecular payload is an oligonucleotide comprising a strand having a region of complementarity of at least 8 nucleotides in length to a sequence as set forth in SEQ ID NO: 6240-12147, 12172-19511, and 26852-27896.

[0768] In some embodiments, the complex described herein comprises an anti-TfR Fab covalently linked via a lysine to the 5′ end of an oligonucleotide (e.g., an oligonucleotide targeting a muscle disease gene listed in Table 1), wherein the anti-TfR Fab comprises a CDR-H1 as set forth in SEQ ID NO: 268, a CDR-H2 as set forth in SEQ ID NO: 18, a CDR-H3 as set forth in SEQ ID NO: 19, a CDR-L1 as set forth in SEQ ID NO: 20, a CDR-L2 as set forth in SEQ ID NO: 21, and a CDR-L3 as set forth in SEQ ID NO: 22; wherein the complex has the structure of:

[chemical structure]

wherein n is 3 and m is 4. In some embodiments, the molecular payload is an oligonucleotide comprising a strand that comprises a sequence as set forth in any one of SEQ ID NOs: 259-261, 309-12147, and 12172- 28939. In some embodiments, the molecular payload is an oligonucleotide comprising a strand having a region of complementarity of at least 8 nucleotides in length to a sequence as set forth in SEQ ID NO: 6240-12147, 12172-19511, and 26852-27896.

[0769] In some embodiments, the complex described herein comprises an anti-TfR Fab covalently linked via a lysine to the 5′ end of an oligonucleotide (e.g., an oligonucleotide targeting a muscle disease gene listed in Table 1), wherein the anti-TfR Fab comprises a CDR-H1 as set forth in SEQ ID NO: 165, a CDR-H2 as set forth in SEQ ID NO: 166, a CDR-H3 as set forth in SEQ ID NO: 167, a CDR-L1 as set forth in SEQ ID NO: 168, a CDR-L2 as set forth in SEQ ID NO: 169, and a CDR-L3 as set forth in SEQ ID NO: 22; wherein the complex has the structure of:

[chemical structure]

wherein n is 3 and m is 4. In some embodiments, the molecular payload is an oligonucleotide comprising a strand that comprises a sequence as set forth in any one of SEQ ID NOs: 259-261, 309-12147, and 12172- 28939. In some embodiments, the molecular payload is an oligonucleotide comprising a strand having a region of complementarity of at least 8 nucleotides in length to a sequence as set forth in SEQ ID NO: 6240-12147, 12172-19511, and 26852-27896.

[0770] In some embodiments, the complex described herein comprises an anti-TfR Fab covalently linked via a lysine to the 5′ end of an oligonucleotide (e.g., an oligonucleotide targeting a muscle disease gene listed in Table 1), wherein the anti-TfR Fab comprises a CDR-H1 as set forth in SEQ ID NO: 267, a CDR-H2 as set forth in SEQ ID NO: 166, a CDR-H3 as set forth in SEQ ID NO: 167, a CDR-L1 as set forth in SEQ ID NO: 168, a CDR-L2 as set forth in SEQ ID NO: 169, and a CDR-L3 as set forth in SEQ ID NO: 22; wherein the complex has the structure of:

[chemical structure]

wherein n is 3 and m is 4. In some embodiments, the molecular payload is an oligonucleotide comprising a strand that comprises a sequence as set forth in any one of SEQ ID NOs: 259-261, 309-12147, and 12172- 28939. In some embodiments, the molecular payload is an oligonucleotide comprising a strand having a region of complementarity of at least 8 nucleotides in length to a sequence as set forth in SEQ ID NO: 6240-12147, 12172-19511, and 26852-27896.

[0771] In some embodiments, the complex described herein comprises an anti-TfR Fab covalently linked via a lysine to the 5′ end of an oligonucleotide (e.g., an oligonucleotide targeting a muscle disease gene listed in Table 1), wherein the anti-TfR Fab comprises a CDR-H1 as set forth in SEQ ID NO: 269, a CDR-H2 as set forth in SEQ ID NO: 166, a CDR-H3 as set forth in SEQ ID NO: 167, a CDR-L1 as set forth in SEQ ID NO: 168, a CDR-L2 as set forth in SEQ ID NO: 169, and a CDR-L3 as set forth in SEQ ID NO: 22; wherein the complex has the structure of:

[chemical structure]

wherein n is 3 and m is 4. In some embodiments, the molecular payload is an oligonucleotide comprising a strand that comprises a sequence as set forth in any one of SEQ ID NOs: 259-261, 309-12147, and 12172- 28939. In some embodiments, the molecular payload is an oligonucleotide comprising a strand having a region of complementarity of at least 8 nucleotides in length to a sequence as set forth in SEQ ID NO: 6240-12147, 12172-19511, and 26852-27896.

[0772] In some embodiments, the complex described herein comprises an anti-TfR Fab covalently linked via a lysine to the 5′ end of an oligonucleotide (e.g., an oligonucleotide targeting a muscle disease gene listed in Table 1), wherein the anti-TfR Fab comprises a CDR-H1 as set forth in SEQ ID NO: 170, a CDR-H2 as set forth in SEQ ID NO: 171, a CDR-H3 as set forth in SEQ ID NO: 172, a CDR-L1 as set forth in SEQ ID NO: 173, a CDR-L2 as set forth in SEQ ID NO: 21, and a CDR-L3 as set forth in SEQ ID NO: 174; wherein the complex has the structure of:

[chemical structure]

wherein n is 3 and m is 4. In some embodiments, the molecular payload is an oligonucleotide comprising a strand that comprises a sequence as set forth in any one of SEQ ID NOs: 259-261, 309-12147, and 12172- 28939. In some embodiments, the molecular payload is an oligonucleotide comprising a strand having a region of complementarity of at least 8 nucleotides in length to a sequence as set forth in SEQ ID NO: 6240-12147, 12172-19511, and 26852-27896.

[0773] In some embodiments, the complex described herein comprises an anti-TfR Fab covalently linked via a lysine to the 5′ end of an oligonucleotide (e.g., an oligonucleotide targeting a muscle disease gene listed in Table 1), wherein the anti-TfR Fab comprises a CDR-H1 as set forth in SEQ ID NO: 188, a CDR-H2 as set forth in SEQ ID NO: 189, a CDR-H3 as set forth in SEQ ID NO: 190, a CDR-L1 as set forth in SEQ ID NO: 191, a CDR-L2 as set forth in SEQ ID NO: 192, and a CDR-L3 as set forth in SEQ ID NO: 193; wherein the complex has the structure of:

[chemical structure]

wherein n is 3 and m is 4. In some embodiments, the molecular payload is an oligonucleotide comprising a strand that comprises a sequence as set forth in any one of SEQ ID NOs: 259-261, 309-12147, and 12172- 28939. In some embodiments, the molecular payload is an oligonucleotide comprising a strand having a region of complementarity of at least 8 nucleotides in length to a sequence as set forth in SEQ ID NO: 6240-12147, 12172-19511, and 26852-27896.

[0774] In some embodiments, the complex described herein comprises an anti-TfR Fab covalently linked via a lysine to the 5′ end of an oligonucleotide (e.g., an oligonucleotide targeting a muscle disease gene listed in Table 1), wherein the anti-TfR Fab comprises a CDR-H1 as set forth in SEQ ID NO: 194, a CDR-H2 as set forth in SEQ ID NO: 195, a CDR-H3 as set forth in SEQ ID NO: 196, a CDR-L1 as set forth in SEQ ID NO: 197, a CDR-L2 as set forth in SEQ ID NO: 198, and a CDR-L3 as set forth in SEQ ID NO: 193; wherein the complex has the structure of:

[chemical structure]

wherein n is 3 and m is 4. In some embodiments, the molecular payload is an oligonucleotide comprising a strand that comprises a sequence as set forth in any one of SEQ ID NOs: 259-261, 309-12147, and 12172- 28939. In some embodiments, the molecular payload is an oligonucleotide comprising a strand having a region of complementarity of at least 8 nucleotides in length to a sequence as set forth in SEQ ID NO: 6240-12147, 12172-19511, and 26852-27896.

[0775] In some embodiments, the complex described herein comprises an anti-TfR Fab covalently linked via a lysine to the 5′ end of an oligonucleotide (e.g., an oligonucleotide targeting a muscle disease gene listed in Table 1), wherein the anti-TfR Fab comprises a CDR-H1 as set forth in SEQ ID NO: 199, a CDR-H2 as set forth in SEQ ID NO: 200, a CDR-H3 as set forth in SEQ ID NO: 201, a CDR-L1 as set forth in SEQ ID NO: 202, a CDR-L2 as set forth in SEQ ID NO: 192, and a CDR-L3 as set forth in SEQ ID NO: 203; wherein the complex has the structure of:

[chemical structure]

wherein n is 3, and m is 4. In some embodiments, the molecular payload is an oligonucleotide comprising a strand that comprises a sequence as set forth in any one of SEQ ID NOs: 259-261, 309-12147, and 12172- 28939. In some embodiments, the molecular payload is an oligonucleotide comprising a strand having a region of complementarity of at least 8 nucleotides in length to a sequence as set forth in SEQ ID NO: 6240-12147, 12172-19511, and 26852-27896.

[0776] In some embodiments, in any one of the examples of complexes described herein, L1 is

[chemical structure]

wherein the piperazine moiety links to the oligonucleotide, wherein L2 is

[chemical structure]

[chemical structure]

[chemical structure]

[chemical structure]

[chemical structure]

[chemical structure]

[chemical structure]

[chemical structure]

[chemical structure]

[chemical structure]

[chemical structure]

[chemical structure]

, or

[chemical structure]

[0777] In some embodiments, in any one of the examples of complexes described herein, L1 is:

[chemical structure]

wherein the piperazine moiety links to the oligonucleotide.

[0778] In some embodiments, in any one of the examples of complexes described herein, L1 is

[chemical structure]

[0779] In some embodiments, L1 is linked to the 5′ phosphate of the oligonucleotide. In some embodiments, L1 is linked to the 5′ phosphorothioate of the oligonucleotide. In some embodiments, L1 is linked to the 5′ phosphonoamidate of the oligonucleotide.

[0780] In some embodiments, L1 is optional (e.g., need not be present).

### III. Formulations

[0781] Complexes provided herein may be formulated in any suitable manner. Generally, complexes provided herein are formulated in a manner suitable for pharmaceutical use. For example, complexes can be delivered to a subject using a formulation that minimizes degradation, facilitates delivery and/or (e.g., and) uptake, or provides another beneficial property to the complexes in the formulation. In some embodiments, provided herein are compositions comprising complexes and pharmaceutically acceptable carriers. Such compositions can be suitably formulated such that when administered to a subject, either into the immediate environment of a target cell or systemically, a sufficient amount of the complexes enter target muscle cells. In some embodiments, complexes are formulated in buffer solutions such as phosphate-buffered saline solutions, liposomes, micellar structures, and capsids.

[0782] It should be appreciated that, in some embodiments, compositions may include separately one or more components of complexes provided herein (e.g., muscle-targeting agents, linkers, molecular payloads, or precursor molecules of any one of them).

[0783] In some embodiments, complexes are formulated in water or in an aqueous solution (e.g., water with pH adjustments). In some embodiments, complexes are formulated in basic buffered aqueous solutions (e.g., PBS). In some embodiments, formulations as disclosed herein comprise an excipient. In some embodiments, an excipient confers to a composition improved stability, improved absorption, improved solubility and/or (e.g., and) therapeutic enhancement of the active ingredient. In some embodiments, an excipient is a buffering agent (e.g., sodium citrate, sodium phosphate, a tris base, or sodium hydroxide) or a vehicle (e.g., a buffered solution, petrolatum, dimethyl sulfoxide, or mineral oil).

[0784] In some embodiments, a complex or component thereof (e.g., oligonucleotide or antibody) is lyophilized for extending its shelf-life and then made into a solution before use (e.g., administration to a subject). Accordingly, an excipient in a composition comprising a complex, or component thereof, described herein may be a lyoprotectant (e.g., mannitol, lactose, polyethylene glycol, or polyvinyl pyrolidone), or a collapse temperature modifier (e.g., dextran, ficoll, or gelatin).

[0785] In some embodiments, a pharmaceutical composition is formulated to be compatible with its intended route of administration. Examples of routes of administration include parenteral, e.g., intravenous, intradermal, subcutaneous, administration. Typically, the route of administration is intravenous or subcutaneous. In some embodiments, the route of administration is extramuscular parenteral administration.

[0786] Pharmaceutical compositions suitable for injectable use include sterile aqueous solutions (where water soluble) or dispersions and sterile powders for the extemporaneous preparation of sterile injectable solutions or dispersions. The carrier can be a solvent or dispersion medium containing, for example, water, ethanol, polyol (for example, glycerol, propylene glycol, and liquid polyethylene glycol, and the like), and suitable mixtures thereof. In some embodiments, formulations include isotonic agents, for example, sugars, polyalcohols such as mannitol, sorbitol, and sodium chloride in the composition. Sterile injectable solutions can be prepared by incorporating the complexes in a required amount in a selected solvent with one or a combination of ingredients enumerated above, as required, followed by filtered sterilization.

[0787] In some embodiments, a composition may contain at least about 0.1% of the a complex, or component thereof, or more, although the percentage of the active ingredient(s) may be between about 1 % and about 80% or more of the weight or volume of the total composition. Factors such as solubility, bioavailability, biological half-life, route of administration, product shelf life, as well as other pharmacological considerations will be contemplated by one skilled in the art of preparing such pharmaceutical formulations, and as such, a variety of dosages and treatment regimens may be desirable.

### IV. Methods of Use / Treatment

[0788] Complexes comprising a muscle-targeting agent covalently linked to a molecular payload as described herein are effective in treating a muscle disease (e.g., a rare muscle disease). In some embodiments, complexes are effective in treating a muscle disease provided in Table 1 or Appendix B. In some embodiments, a muscle disease is associated with a disease allele, for example, a disease allele for a particular muscle disease may comprise a genetic alteration in a corresponding gene listed in Table 1 or Appendix B or C.

[0789] In some embodiments, a subject may be a human subject, a non-human primate subject, a rodent subject, or any suitable mammalian subject. In some embodiments, a subject may have a muscle disease provided in Table 1 ot Appendix B.

[0790] An aspect of the disclosure includes a methods involving administering to a subject an effective amount of a complex as described herein. In some embodiments, an effective amount of a pharmaceutical composition that comprises a complex comprising a muscle-targeting agent covalently linked to a molecular payload can be administered to a subject in need of treatment. In some embodiments, a pharmaceutical composition comprising a complex as described herein may be administered by a suitable route, which may include intravenous administration, e.g., as a bolus or by continuous infusion over a period of time. In some embodiments, intravenous administration may be performed by intramuscular, intraperitoneal, intracerebrospinal, subcutaneous, intra-articular, intrasynovial, or intrathecal routes. In some embodiments, a pharmaceutical composition may be in solid form, aqueous form, or a liquid form. In some embodiments, an aqueous or liquid form may be nebulized or lyophilized. In some embodiments, a nebulized or lyophilized form may be reconstituted with an aqueous or liquid solution.

[0791] Compositions for intravenous administration may contain various carriers such as vegetable oils, dimethylactamide, dimethyformamide, ethyl lactate, ethyl carbonate, isopropyl myristate, ethanol, and polyols (glycerol, propylene glycol, liquid polyethylene glycol, and the like). For intravenous injection, water soluble antibodies can be administered by the drip method, whereby a pharmaceutical formulation containing the antibody and a physiologically acceptable excipients is infused. Physiologically acceptable excipients may include, for example, 5% dextrose, 0.9% saline, Ringer’s solution or other suitable excipients. Intramuscular preparations, e.g., a sterile formulation of a suitable soluble salt form of the antibody, can be dissolved and administered in a pharmaceutical excipient such as Water-for-Injection, 0.9% saline, or 5% glucose solution.

[0792] In some embodiments, a pharmaceutical composition that comprises a complex comprising a muscle-targeting agent covalently linked to a molecular payload is administered via site-specific or local delivery techniques. Examples of these techniques include implantable depot sources of the complex, local delivery catheters, site specific carriers, direct injection, or direct application.

[0793] In some embodiments, a pharmaceutical composition that comprises a complex comprising a muscle-targeting agent covalently linked to a molecular payload is administered at an effective concentration that confers therapeutic effect on a subject. Effective amounts vary, as recognized by those skilled in the art, depending on the severity of the disease, unique characteristics of the subject being treated, e.g. age, physical conditions, health, or weight, the duration of the treatment, the nature of any concurrent therapies, the route of administration and related factors. These related factors are known to those in the art and may be addressed with no more than routine experimentation. In some embodiments, an effective concentration is the maximum dose that is considered to be safe for the patient. In some embodiments, an effective concentration will be the lowest possible concentration that provides maximum efficacy.

[0794] Empirical considerations, e.g. the half-life of the complex in a subject, generally will contribute to determination of the concentration of pharmaceutical composition that is used for treatment. The frequency of administration may be empirically determined and adjusted to maximize the efficacy of the treatment.

[0795] Generally, for administration of any of the complexes described herein, an initial candidate dosage may be about 1 to 100 mg/kg, or more, depending on the factors described above, e.g. safety or efficacy. In some embodiments, a treatment will be administered once. In some embodiments, a treatment will be administered daily, biweekly, weekly, bimonthly, monthly, or at any time interval that provide maximum efficacy while minimizing safety risks to the subject. Generally, the efficacy and the treatment and safety risks may be monitored throughout the course of treatment

[0796] The efficacy of treatment may be assessed using any suitable methods. In some embodiments, the efficacy of treatment may be assessed by evaluation of observation of symptoms associated with a muscle disease.

[0797] In some embodiments, a pharmaceutical composition that comprises a complex comprising a muscle-targeting agent covalently linked to a molecular payload described herein is administered to a subject at an effective concentration sufficient to inhibit activity or expression of a target gene by at least 10%, at least 20%, at least 30%, at least 40%, at least 50%, at least 60%, at least 70%, at least 80%, at least 90% or at least 95% relative to a control, e.g. baseline level of gene expression prior to treatment.

[0798] In some embodiments, a single dose or administration of a pharmaceutical composition that comprises a complex comprising a muscle-targeting agent covalently linked to a molecular payload described herein to a subject is sufficient to inhibit activity or expression of a target gene for at least 1-5, 1-10, 5-15, 10-20, 15-30, 20-40, 25-50, or more days. In some embodiments, a single dose or administration of a pharmaceutical composition that comprises a complex comprising a muscle-targeting agent covalently linked to a molecular payload described herein to a subject is sufficient to inhibit activity or expression of a target gene for at least 1, 2, 3, 4, 5, 6, 7, 8, 9, 10, 11, or 12 weeks. In some embodiments, a single dose or administration of a pharmaceutical composition that comprises a complex comprising a muscle-targeting agent covalently linked to a molecular payload described herein to a subject is sufficient to inhibit activity or expression of a target gene for at least 1, 2, 3, 4, 5, or 6 months.

[0799] In some embodiments, a pharmaceutical composition may comprises more than one complex comprising a muscle-targeting agent covalently linked to a molecular payload. In some embodiments, a pharmaceutical composition may further comprise any other suitable therapeutic agent for treatment of a subject, e.g. a human subject having a muscle disease (e.g., a muscle disease provided in Table 1). In some embodiments, the other therapeutic agents may enhance or supplement the effectiveness of the complexes described herein. In some embodiments, the other therapeutic agents may function to treat a different symptom or disease than the complexes described herein.

### EXAMPLES

### Example 1: Targeting DMPK With Transfected Antisense Oligonucleotides

[0800] A gapmer antisense oligonucleotide that targets both wild-type and mutant alleles of DMPK (control DMPK-ASO) was tested in vitro for its ability to reduce expression levels of DMPK in an immortalized cell line. Briefly, Hepa 1-6 cells were transfected with the control DMPK-ASO (100 nM) formulated with lipofectamine 2000. DMPK expression levels were evaluated 72 hours following transfection. A control experiment was also performed in which vehicle (phosphate-buffered saline) was delivered to Hepa 1-6 cells in culture and the cells were maintained for 72 hours. As shown in FIG. 1, it was found that the control DMPK-ASO reduced DMPK expression levels by -90% compared with controls.

### Example 2: Targeting DMPK With a Muscle-Targeting Complex

[0801] A muscle-targeting complex was generated comprising the DMPK ASO used in Example 1 (control DMPK-ASO) covalently linked, via a cathepsin cleavable linker, to DTX-A-002 (RI7 217 (Fab)), an anti-transferrin receptor antibody.

[0802] Briefly, a maleimidocaproyl-L-valine-L-citrulline-p-aminobenzyl alcohol p-nitrophenyl carbonate (MC-Val-Cit-PABC-PNP) linker molecule was coupled to NH₂-C₆-control DMPK-ASO using an amide coupling reaction. Excess linker and organic solvents were removed by gel permeation chromatography. The purified Val-Cit-linker-control DMPK-ASO was then coupled to a thiol-reactive anti-transferrin receptor antibody (DTX-A-002).

[0803] The product of the antibody coupling reaction was subjected to hydrophobic interaction chromatography (HIC-HPLC). FIG. 2A shows a resulting HIC-HPLC trace, in which fractions B7-C2 of the trace (denoted by vertical lines) contained ASO to antibody ratio of 1 or 2 as determined by SDS-PAGE. These fractions were pooled to arrive at the final muscle-targeting complex, referred to as DTX-C-008. Densitometry confirmed that DTX-C-008 had an average ASO to antibody ratio of 1.48, and SDS-PAGE revealed a purity of 86.4% (FIG. 2B).

[0804] Using the same approach, a control complex was generated comprising the DMPK ASO used in Example 1 (control DMPK-ASO) covalently linked via a Val-Cit linker to an IgG2a (Fab) antibody (DTX-C-007).

[0805] The purified DTX-C-008 was then tested for cellular internalization and inhibition of DMPK. Hepa 1-6 cells, which have relatively high expression levels of transferrin receptor, were incubated in the presence of vehicle control, DTX-C-008 (100 nM), or DTX-C-007 (100 nM) for 72 hours. After the 72 hour incubation, the cells were isolated and assayed for expression levels of DMPK (FIG. 3). Cells treated with the DTX-C-008 demonstrated a reduction in DMPK expression by -65% relative to the cells treated with the vehicle control. Meanwhile, cells treated with the DTX-C-007 had DMPK expression levels comparable to the vehicle control (no reduction in DMPK expression). These data indicate that the anti-transferrin receptor antibody of the DTX-C-008 enabled cellular internalization of the complex, thereby allowing the DMPK ASO to inhibit expression of DMPK.

### Example 3: Targeting DMPK in Mouse Muscle Tissues With a Muscle-Targeting Complex

[0806] The muscle-targeting complex described in Example 2, DTX-C-008, was tested for inhibition of DMPK in mouse tissues. C57BL/6 wild-type mice were intravenously injected with a single dose of a vehicle control, DMPK-1 (3 mg/kg of RNA), DTX-C-008 (3 mg/kg of RNA, corresponding to 20 mg/kg antibody conjugate), or DTX-C-007 (3 mg/kg of RNA, corresponding to 20 mg/kg antibody conjugate). Control DMPK-ASO, the DMPK ASO as described in Example 1, was used as a control. Each experimental condition was replicated in three individual C57BL/6 wild-type mice. Following a seven-day period after injection, the mice were euthanized and segmented into isolated tissue types. Individual tissue samples were subsequently assayed for expression levels of DMPK (FIGS. 4A-4E and 5A-5B).

[0807] Mice treated with the DTX-C-008 complex demonstrated a reduction in DMPK expression in a variety of skeletal, cardiac, and smooth muscle tissues. For example, as shown in FIGS. 4A-4E, DMPK expression levels were significantly reduced in gastrocnemius (50% reduction), heart (30% reduction), esophagus (45% reduction), tibialis anterior (47% reduction), and soleus (31% reduction) tissues, relative to the mice treated with the vehicle control. Meanwhile, mice treated with the DTX-C-007 complex had DMPK expression levels comparable to the vehicle control (no reduction in DMPK expression) for all assayed muscle tissue types.

[0808] Mice treated with the DTX-C-008 complex demonstrated no change in DMPK expression in non-muscle tissues such as spleen and brain tissues (FIGS. 5A and 5B).

[0809] These data indicate that the anti-transferrin receptor antibody of the DTX-C-008 enabled cellular internalization of the complex into muscle-specific tissues in an in vivo mouse model, thereby allowing the DMPK ASO to inhibit expression of DMPK. These data further demonstrate that the DTX-C-008 complex is capable of specifically targeting muscle tissues.

### Example 4: Targeting DMPK in Mouse Muscle Tissues With a Muscle-Targeting Complex

[0810] The muscle-targeting complex described in Example 2, DTX-C-008, was tested for dose-dependent inhibition of DMPK in mouse tissues. C57BL/6 wild-type mice were intravenously injected with a single dose of a vehicle control (phosphate-buffered saline, PBS), control DMPK-ASO (10 mg/kg of RNA), DTX-C-008 (3 mg/kg or 10 mg/kg of RNA, wherein 3 mg/kg corresponds to 20 mg/kg antibody conjugate), or DTX-C-007 (3 mg/kg or 10 mg/kg of RNA, wherein 3 mg/kg corresponds to 20 mg/kg antibody conjugate). Control DMPK-ASO, the DMPK ASO as described in Example 1, was used as a control. Each experimental condition was replicated in five individual C57BL/6 wild-type mice. Following a seven-day period after injection, the mice were euthanized and segmented into isolated tissue types. Individual tissue samples were subsequently assayed for expression levels of DMPK (FIGS. 6A-6F).

[0811] Mice treated with the DTX-C-008 complex demonstrated a reduction in DMPK expression in a variety of skeletal muscle tissues. As shown in FIGS. 6A-6F, DMPK expression levels were significantly reduced in tibialis anterior (58% and 75% reduction for 3 mg/kg and 10 mg/kg DTX-C-008, respectively), soleus (55% and 66% reduction for 3 mg/kg and 10 mg/kg DTX-C-008, respectively), extensor digitorum longus (EDL) (52% and 72% reduction for 3 mg/kg and 10 mg/kg DTX-C-008, respectively), gastrocnemius (55% and 77% reduction for 3 mg/kg and 10 mg/kg DTX-C-008, respectively), heart (19% and 35% reduction for 3 mg/kg and 10 mg/kg DTX-C-008, respectively), and diaphragm (53% and 70% reduction for 3 mg/kg and 10 mg/kg DTX-C-008, respectively) tissues, relative to the mice treated with the vehicle control. Notably, all assayed muscle tissue types experienced dose-dependent inhibition of DMPK, with greater reduction in DMPK levels at 10 mg/kg antibody conjugate relative to 3 mg/kg antibody conjugate.

[0812] Meanwhile, mice treated with the control DTX-C-007 complex had DMPK expression levels comparable to the vehicle control (no reduction in DMPK expression) for all assayed muscle tissue types. These data indicate that the anti-transferrin receptor antibody of the DTX-C-008 enabled cellular internalization of the complex into muscle-specific tissues in an in vivo mouse model, thereby allowing the DMPK ASO to inhibit expression of DMPK. These data further demonstrate that the DTX-C-008 complex is capable of specifically targeting muscle tissues for dose-dependent inhibition of DMPK.

### Example 5: Targeting DMPK in Cynomolgus Monkey Muscle Tissues With a Muscle-Targeting Complex

[0813] A muscle-targeting complex comprising control DMPK-ASO (DTX-C-012), was generated and purified using methods described in Example 2. DTX-C-012 is a complex comprising a human anti-transferrin antibody (a 15G11 antibody comprising a heavy chain comprising the amino acid sequence of SEQ ID NO: 240 and a light chain comprising the amino acid sequence of SEQ ID NO: 237) that binds to the human transferrin receptor and the cynomolgus monkey transferrin receptor, covalently linked, via a cathepsin cleavable Val-Cit linker, to control DMPK-ASO, an antisense oligonucleotide that targets DMPK. Following HIC-HPLC purification, densitometry confirmed that DTX-C-012 had an average ASO to antibody ratio of 1.32, and SDS-PAGE revealed a purity of 92.3%.

[0814] DTX-C-012 was tested for dose-dependent inhibition of DMPK in male cynomolgus monkey tissues. Male cynomolgus monkeys (19-31 months; 2-3 kg) were intravenously injected with a single dose of a saline control, control DMPK-ASO (naked DMPK ASO) (10 mg/kg of RNA), or DTX-C-012 (10 mg/kg of RNA) on Day 0. Each experimental condition was replicated in three individual male cynomolgus monkeys. On Day 7 after injection, tissue biopsies (including muscle tissues) were collected. DMPK mRNA expression levels, ASO detection assays, serum clinical chemistries, tissue histology, clinical observations, and body weights were analyzed. The monkeys were euthanized on Day 14.

[0815] Significant knockdown (KD) of DMPK mRNA expression using DTX-C-012 was observed in soleus, deep flexor, and masseter muscles relative to saline control, with 39% KD, 62% KD, and 41% KD, respectively (FIGS. 7A-7C). Robust knockdown of DMPK mRNA expression DTX-C-012 was further observed in gastrocnemius (62% KD; FIG. 7D), EDL (29% KD; FIG. 7E), tibialis anterior muscle (23% KD; FIG. 7F), diaphragm (54% KD; FIG. 7G), tongue (43% KD; FIG. 7H), heart muscle (36% KD; FIG. 7I), quadriceps (58% KD; FIG. 7J), bicep (51% KD; FIG. 7K), and deltoid muscles (47% KD; FIG. 7L). Knockdown of DMPK mRNA expression DTX-C-012 in smooth muscle was also observed in the intestine, with 63% KD at jejunum-duodenum ends (FIG. 8A) and 70% KD in ileum (FIG. 8B). Notably, naked DMPK ASO (i.e., not linked to a muscle-targeting agent), control DMPK-ASO, had minimal effects on DMPK expression levels relative to the vehicle control (i.e., little or no reduction in DMPK expression) for all assayed muscle tissue types. Monkeys treated with the DTX-C-012 complex demonstrated no change in DMPK expression in non-muscle tissues, such as liver, kidney, brain, and spleen tissues (FIGS. 9A-9D). Additional tissues were examined, as depicted in FIG. 10, which shows normalized DMPK mRNA tissue expression levels across several tissue types in cynomolgus monkeys. (N=3 male cynomolgus monkeys)

[0816] Prior to euthanization, all monkeys were tested for reticulocyte levels, platelet levels, hemoglobin expression, alanine aminotransferase (ALT) expression, aspartate aminotransferase (AST) expression, and blood urea nitrogen (BUN) levels on days 2, 7, and 14 after dosing. As shown in FIG. 12, monkeys dosed with antibody-oligonucleotide complex had normal reticulocyte levels, platelet levels, hemoglobin expression, alanine aminotransferase (ALT) expression, aspartate aminotransferase (AST) expression, and blood urea nitrogen (BUN) levels throughout the length of the experiment. These data show that a single dose of a complex comprising control DMPK-ASO is safe and tolerated in cynomolgus monkeys.

[0817] These data demonstrate that the anti-transferrin receptor 15G11 antibody of the DTX-C-012 complex enabled cellular internalization of the complex into muscle-specific tissues in an in vivo cynomolgus monkey model, thereby allowing the DMPK ASO (control DMPK-ASO) to inhibit expression of DMPK. These data further demonstrate that the DTX-C-012 complex is capable of specifically targeting muscle tissues for dose-dependent inhibition of DMPK without substantially impacting non-muscle tissues. This is direct contrast with the limited ability of control DMPK-ASO, a naked DMPK ASO (i.e., not linked to a muscle-targeting agent), to inhibit expression of DMPK in muscle tissues of an in vivo cynomolgus monkey model.

### Example 6: Targeting DMPK in Mouse Muscle Tissues With a Muscle-Targeting Complex

[0818] The muscle-targeting complex described in Example 2, DTX-C-008, was tested for time-dependent inhibition of DMPK in mouse tissues. C57BL/6 wild-type mice were intravenously injected with a single dose of a vehicle control (saline), control DMPK-ASO (10 mg/kg of RNA), or DTX-C-008 (10 mg/kg of RNA) and euthanized after a prescribed period of time, as described in Table 10. Following euthanization, the mice were segmented into isolated tissue types and tissue samples were subsequently assayed for expression levels of DMPK (FIGS. 11A-11B).

TABLE 10

Experimental conditions

| Group | Dosage | Days after injection before euthanization | Number of mice |
|---|---|---|---|
| 1 | Vehicle (saline) | 3 days | 3 |
| 2 | Vehicle (saline) | 7 days | 3 |
| 3 | Vehicle (saline) | 14 days | 3 |
| 4 | Vehicle (saline) | 28 days | 3 |
| 5 | control DMPK-ASO | 3 days | 3 |
| 6 | control DMPK-ASO | 7 days | 3 |
| 7 | control DMPK-ASO | 14 days | 3 |
| 8 | control DMPK-ASO | 28 days | 3 |
| 9 | DTX-C-008 | 3 days | 3 |
| 10 | DTX-C-008 | 7 days | 3 |
| 11 | DTX-C-008 | 14 days | 3 |
| 12 | DTX-C-008 | 28 days | 3 |

Mice treated with the DTX-C-008 complex demonstrated approximately 50% reduction in DMPK expression in gastrocnemius (FIG. 11A) and tibialis anterior (FIG. 11B) muscles for all of Groups 9-12 (3-28 days between injection and euthanization), relative to vehicle. Mice treated with the control DMPK-ASO naked oligonucleotide did not demonstrate significant reduction in DMPK expression.

### Example 7: Targeting DMPK in Mouse Muscle Tissues With a Muscle-Targeting Complex

[0819] The muscle-targeting complex described in Example 2, DTX-C-008, was tested for time-dependent inhibition of DMPK in mouse tissues in vivo. C57BL/6 wild-type mice were intravenously injected with a single dose of a vehicle control (phosphate-buffered saline (PBS)), control DMPK-ASO antisense oligonucleotide (ASO) (10 mg/kg of RNA), DTX-C-007 control complex (10 mg/kg of RNA), or DTX-C-008 (10 mg/kg of RNA) on Day 0 and euthanized after a prescribed period of time, as described in Table 11. One group of mice in each experimental condition was subjected to a second dose (multi-dose groups) at four weeks (Day 28). Following euthanization, the mice were segmented into isolated tissue types and samples of tibialis anterior and gastrocnemius muscle tissues were subsequently assayed for expression levels of DMPK (FIGS. 13A-13B).

TABLE 11

Experimental conditions

| Group | Dosage | Weeks after injection before euthanization | Number of mice |
|---|---|---|---|
| 1 | Single dose of vehicle (PBS) | 2 | 5 |
| 2 | Single dose of vehicle (PBS) | 4 | 5 |
| 3 | Single dose of vehicle (PBS) | 8 | 3 |
| 4 | Multi-dose of vehicle (PBS) | 8 | 2 |
| 5 | Single dose of vehicle (PBS) | 12 | 5 |
| 6 | Single dose of control DMPK-ASO | 2 | 5 |
| 7 | Single dose of control DMPK-ASO | 4 | 5 |
| 8 | Single dose of control DMPK-ASO | 8 | 5 |
| 9 | Multi-dose of control DMPK-ASO | 8 | 5 |
| 10 | Single dose of control DMPK-ASO | 12 | 5 |
| 11 | Single dose of DTX-C-007 control | 2 | 5 |
| 12 | Single dose of DTX-C-007 control | 4 | 5 |
| 13 | Single dose of DTX-C-007 control | 8 | 5 |
| 14 | Multi-dose of DTX-C-007 control | 8 | 5 |
| 15 | Single dose of DTX-C-007 control | 12 | 5 |
| 16 | Single dose of DTX-C-008 | 2 | 5 |
| 17 | Single dose of DTX-C-008 | 4 | 5 |
| 18 | Single dose of DTX-C-008 | 8 | 5 |
| 19 | Multi-dose of DTX-C-008 | 8 | 5 |
| 20 | Single dose of DTX-C-008 | 12 | 5 |

[0820] Mice treated with the DTX-C-008 complex demonstrated about 50-60% reduction in DMPK expression in tibialis anterior muscle (FIG. 13A) and about 30-50% reduction in DMPK expression in gastrocnemius muscle (FIG. 13B) for all of Groups 16-20 (2-12 weeks between injection and euthanization), relative to vehicle. These data show that a single dose of the muscle-targeting complex DTX-C-008 inhibits expression of DMPK for at least twelve weeks following administration of the complex.

[0821] In contrast, mice treated with the naked antisense oligonucleotide or the control complex did not demonstrate significant inhibition of DMPK expression across all experimental groups and tissues.

[0822] These data demonstrate that a muscle-targeting complex as described herein is capable of providing persistent inhibition of DMPK expression in vivo for up to 12 weeks following a single dose or administration of said muscle targeting complex.

### Example 8: A Muscle-Targeting Complex Can Target Gene Expression in the Nucleus

[0823] A muscle-targeting complex as described in Example 2, DTX-C-008, was tested for inhibition of nuclear-retained DMPK RNA in mouse muscle tissues. The mice used for this Example have been engineered to express a human mutant DMPK gene - DMPK^{CUG380}hets having a G-for-C single-nucleotide polymorphism. As shown in FIG. 14A, the human mutant DMPK RNA is retained in the nucleus, while the mouse wild-type DMPK RNA is located in the cytoplasm and the nucleus.

[0824] Mice were intravenously injected with a single dose of a vehicle control (saline), a control complex DTX-C-007 (10 mg/kg of ASO), control DMPK-ASO (10 mg/kg of RNA), DTX-C-008 (10 mg/kg of ASO) and euthanized after 14 days. Six mice were treated in each experimental condition. Following euthanization, the mice were segmented into isolated tissue types and tissue samples were subsequently assayed for expression levels of mutant and wild-type DMPK (FIG. 14B).

[0825] Mice treated with the muscle-targeting complex DTX-C-008 demonstrated statistically significant reduction in both nuclear-retained mutant DMPK and wild-type DMPK. (p-value <0.05). These data demonstrate that a muscle-targeting complex as described herein is capable of targeting DMPK in the nucleus.

### Example 9: A Muscle-targeting Complex Reverses Myotonia in HSA^{LR} Mouse Model

[0826] A muscle-targeting complex (DTX-Actin) was generated comprising an antisense oligonucleotide that targets actin (Actin-gapmer-1) covalently linked, via a cathepsin cleavable linker, to DTX-A-002 (RI7 217 (Fab)), an anti-transferrin receptor antibody.

[0827] Actin-gapmer-1 is a 2′-MOE 5-10-5 gapmer that comprises: 5′-NH₂-(CH₂)₆-dA*oC*oC*oA*oT*oT*dT*dT*dC*dT*dT*dC*dC*dA*dC*dA*oG*oG*oG*oC*oT-3 (SEQ ID NO: 259); wherein ‘*’ represents a PS linkage; ‘d’ represents a deoxynucleic acid; and ‘o’ represents a 2′-MOE.

[0828] DTX-Actin was then tested for its ability to reduce target gene expression (hACTA1) and reduce myotonia in HSA^{LR} mice, a mouse model that has a functional myotonia phenotype similar to that observed in human DM1 patients. Details of the HSA^{LR} mouse model are as described in Mankodi, A. et al. Science. 289: 1769, 2000. HSA^{LR} mice were intravenously injected with a single dose of PBS or DTX-Actin (either 10 mg/kg or 20 mg/kg ASO). Each of these three experimental conditions were replicated in two individual mice. On Day 14 after injection, mice were euthanized and specific muscles were collected -quadriceps (quad), gastrocnemius (gastroc) and tibialis anterior (TA). The muscle tissues were analyzed for expression of hACTA1. DTX-Actin demonstrated reduction of hACTA1 expression in all three muscle tissues relative to vehicle control (FIG. 15A).

[0829] On Day14 after injection, and prior to the euthanasia and tissue collection described above, electromyography (EMG) was performed on specific muscles. EMG myotonic discharges were graded by a blinded examiner on a 4-point scale: 0, no myotonia; 1, occasional myotonic discharge in less than 50% of needle insertions; 2, myotonic discharge in greater than 50% of needle insertions; and 3: myotonic discharge with nearly every insertion. DTX-Actin demonstrated reduction in graded myotonia in all three muscle tissues relative to vehicle control (FIG. 15B). Mice treated with 20 mg/kg DTX-Actin demonstrated little-to-no myotonia in quadriceps and gastrocnemius muscles.

[0830] These data demonstrate that a single dose of a muscle-targeting complex is capable of gene-specific targeting and reduction in functional myotonia in in the HSA^{LR} mice, a mouse model that has a functional myotonia phenotype similar to that observed in human DM1 patients.

### Example 10: A Muscle-Targeting Complex Can Functionally Correct Arrhythmia in a DM1 Mouse Model

[0831] A muscle-targeting complex as described in Example 2, DTX-C-008, was tested for its ability to functionally correct arrhythmia in a DM1 mouse model. The mice used for this Example are the offspring of mice expressing myosin heavy chain reverse tet transactivator (MHCrtTA) and mice expressing a mutant form of human DMPK (CUG₉₆₀). FIG. 16A shows the structure of the mutant DMPK construct.

[0832] Doxycycline containing chow (2 g doxycycline/kg chow, Bio-Serv) was provided to the mice beginning at postnatal day 1, initially through the nursing dam and subsequently through chow after weaning, to induce selective expression of mutant DMPK in the heart. All mice were maintained on chow containing doxycycline throughout the entire course of the study except the “off Dox Control” group. At 12 weeks of age, all mice underwent a baseline pre-dose ECG evaluation. Mice were then treated intravenously with a single dose of either vehicle (saline), control DMPK-ASO (10 mg/kg), DTX-C-008 (10 mg/kg) or DTX-C-008 (20 mg/kg). Following baseline pre-dose ECG evaluation mice in the “off Dox Control” group were switched to chow without doxycycline. Post dose ECG evaluations were performed in all mice 7 and 14 days after treatment, or in the case of the “off Dox Control” group 7 and 14 days after reversion to chow without doxycycline. For each ECG spectra, QRS (FIG. 16B) and QTc (FIG. 16C) intervals were measured.

[0833] In this model, mice treated with doxycycline exhibit prolongation of QRS and QTC intervals driven by expression of mutant DMPK in the heart, similar to those reported in DM1 patients, and consistent with increased propensity for cardiac arrhythmia. Removal of doxycycline for the diet in the “Off Dox Control” group turns off expression of mutant DMPK, resulting in a normalization of QRS and QTC intervals. Mice maintained on doxycycline and treated with 20 mg/kg of the muscle-targeting complex DTX-C-008 demonstrated statistically significant reduction in their QTc intervals after 14 days despite continued expression of mutant DMPK in the heart (FIG. 16C). This reduction in QTc intervals represents a correction in cardiac arrhythmia in a DM1 mouse model. These data demonstrate that a muscle-targeting complex as described herein is capable of providing a phenotypic and therapeutic benefit in a DM1 model.

### Example 11: A Muscle-Targeting Complex Can Target DMPK and Correct DM1-Related Gene Splicing

[0834] In isolated muscles cells derived from human DM1 patients, a muscle-targeting complex as described in Example 5, DTX-C-012, which comprises a 15G11 antibody, was tested for reduction of DMPK expression and subsequent correction of splicing defects in Bin1, a downstream gene of DMPK.

[0835] Briefly, patient cells were seeded at a density of 10 k cells/well before being allowed to recover overnight. Cells were then treated with PBS (vehicle control), control DMPK-ASO, or DTX-C-012 (500 nM; equivalent to 55.5 nM ASO). Cells were allowed to differentiate for 14 days. Expression levels of DMPK and %Bin1 exon-11 inclusion were determined on Days 10, 11, 12, 13, and 14 post differentiation.

[0836] Treatment of DM1 patient cells with the DTX-C-012 complex leads to reduction of DMPK levels as early as Day 10 post differentiation (FIG. 17A). Treatment of DM1 patient cells with the DTX-C-012 complex also leads to a statistically significant time-dependent change in Bin1 splicing (FIG. 17B). (**p<0.01, ***p<0.001). These data demonstrate that a muscle-targeting complex comprising a 15G11 antibody as described herein is capable of providing phenotypic and therapeutic benefit (increased correction of DM1 gene-specific splicing) in a DM1 model.

### Example 12: A Muscle-Targeting Complex Enables Cellular Internalization and Targeting of DUX4

[0837] A muscle-targeting complex (anti-TfR-FM10) was generated comprising the FM10 PMO covalently linked to an anti-transferrin receptor antibody (a 15G11 antibody comprising a heavy chain comprising the amino acid sequence of SEQ ID NO: 240 and a light chain comprising the amino acid sequence of SEQ ID NO: 237) that binds to the human transferrin receptor.

[0838] Briefly, purified Val-Cit-linker-FM10 was coupled to a functionalized 15G11 antibody generated through modifying ε-amine on lysine of the antibody.

[0839] The product of the antibody coupling reaction was then subjected to hydrophobic interaction chromatography (HIC) and size exclusion chromatography (SEC) to isolate pure conjugate. Ultrafiltration was then used to concentrate the conjugate and densitometry confirmed that this sample of anti-TfR-FM10 complexes had an average ASO to antibody ratio of 1.9.

[0840] FM10 is a phosphorodiamidate morpholino oligomer (PMO) and comprises the sequence GGGCATTTTAATATATCTCTGAACT (SEQ ID NO: 260).

[0841] Human U-2 OS cells were dosed with the complex. Briefly, U-2 OS cells were seeded at a density of 10 k cells/well before being allowed to recover overnight. Cells were then treated with one of the following treatments - vehicle control (PBS), a siRNA that targets DUX4, naked FM10 PMO (1 µM), naked FM10 PMO (10 µM), or anti-TfR-FM10 (1 µM; equivalent to 250 nM naked PMO). Cells were incubated for 72 hours before being harvested for total RNA. cDNA was then synthesized from the total RNA extracts and qPCR was performed to determine expression of downstream DUX4 genes (ZSCAN4, MBD3L2, TRIM43) in technical quadruplicate. All qPCR data were analyzed using a standard ΔΔCT method and were normalized to a plate-based negative control comprised of untreated cells (i.e., without any oligonucleotide). Results were then converted to fold change to evaluate efficacy.

[0842] As shown in FIG. 18, upregulation of DUX4 in FSHD leads to the upregulation of disease characteristic genes including ZSCAN4, MBD3L2, and TRIM43. In U-2 OS cells that express DUX4 and have elevated levels of ZSCAN4, MDB3L2 and TRIM43, mirroring pathologically relevant events in FSHD patient cells, treatment with naked FM10 at 1 µM fails to reduce ZSCAN4, MBD3L2, and TRIM43 expression. Increased concentration of naked FM10 (to 10 µM) leads to a modest reduction in ZSCAN4 and TRIM43 expression, but has no effect on MDB3L2 expression. In contrast, treatment with anti-TfR-FM10 (1 µM concentration; equivalent to ~200 nM of naked FM10) significantly reduced expression of MBD3L2, ZSCAN4 and TRIM43.

[0843] These data indicate that the anti-transferrin receptor 15G11 antibody of the anti-TfR-FM 10 complex enabled cellular internalization of the complex into U-2 OS cells, thereby allowing the FM10 PMO to inhibit expression of DUX4.

### Example 13: Targeting DMD With a Muscle-Targeting Complex

[0844] A muscle-targeting complex (MDX-ASO-Complex) was generated comprising an exon-23 PMO ASO covalently linked to DTX-A-002 (RI7 217 (Fab)), an anti-transferrin receptor antibody.

[0845] Briefly, a Bicyclo[6.1.0]nonyne-PEG3-L-valine-L-citrulline-pentafluorophenyl ester (BCN-PEG3-Val-Cit-PFP) linker molecule was coupled to NH₂-C₆-(exon-23 PMO) using an amide coupling reaction. Excess linker and organic solvents were removed by gel permeation chromatography. The purified Val-Cit-linker-(exon-23 PMO) was then coupled to an azide functionalized anti-transferrin receptor antibody (DTX-A-002) generated through modifying ε-amine on lysine with Azide-PEG4-PFP.

[0846] The product of the antibody coupling reaction was then subjected to hydrophobic interaction chromatography (HIC-HPLC) and hydroxyapatite chromatography (HA). The conjugate was then concentrated by tangential flow filtration (TFF) and densitometry confirmed that this sample of MDX-ASO-Complex complexes had an average ASO to antibody ratio of 1.9.

[0847] The exon-23 PMO ASO used in this Example comprises a sequence consisting of GGCCAAACCUCGGCUUACCUGAAAU (SEQ ID NO: 261).

[0848] MDX-ASO-Complex was tested for its ability to induce exon skipping of exon 23 of the dystrophin gene, and to subsequently increase expression of dystrophin protein in targeted muscles relevant to DMD in vivo. mdx mice, a DMD mouse model, were intravenously injected with a single dose of a vehicle control (saline); MDX-Complex at a dose of 10 mg/kg ASO; MDX-ASO-Complex at a dose of 20 mg/kg ASO; or MDX-ASO-complex at a dose of 30 mg/kg ASO. Each experimental condition was replicated in four mdx mice. Four wild-type mice were also dosed with vehicle control (saline) as a control experiment.

[0849] Fourteen days after treatment, mice were euthanized and targeted muscle tissues were collected. Individual muscle tissue samples were subsequently assayed for percent skipping of exon 23 of the dystrophin gene (FIG. 19). Additionally, dystrophin protein levels in targeted muscles was also quantified (FIGS. 20A-20B).

[0850] Mice treated with MDX-ASO-Complex demonstrated a dose-dependent increase in the percent exon skipping of exon 23 in quadriceps, diaphragm, and heart muscles. Mice treated with MDX-ASO-Complex also demonstrated a dose-dependent increase in the expression of dystrophin protein in the quadriceps, with an average of >4% dystrophin protein in mice treated with 30 mg/kg ASO MDX-ASO-Complex.

[0851] These data demonstrate that the anti-transferrin receptor antibody of MDX-ASO-Complex enables cellular internalization of the complex into muscle-specific tissues in an in vivo mdx mouse model, thereby allowing the exon 23 PMO ASO to induce exon skipping of exon 23 of DMD. These data further demonstrate that MDX-ASO-Complex is capable of specifically targeting muscle tissues.

### Example 14: Targeting DMD With a Muscle-targeting Complex to Demonstrate Functional Benefit in mdx Mouse Model

[0852] Mdx mice (DMD mouse model; diseased mice) were intravenously injected with a single dose of a vehicle control (saline); the MDX-ASO (naked exon 23 skipping PMO ASO, 30 mg/kg); or the MDX-ASO-Complex as described in Example 13 (anti-transferrin receptor antibody linked to exon 23 skipping PMO, 30 mg/kg). Each experimental condition was replicated in five mdx mice. Five wild-type mice (healthy mice) were also dosed with vehicle control (saline).

[0853] Two weeks after injection, the functional activity of all treated mice was determined using an open field chamber experiment. The experiment involved three consecutive stages: (1) a 10-minute period during which each mouse was placed into an open field chamber; (2) a 10-minute period during which each mouse was subjected to a hind limb fatigue challenge; and (3) a 10-minute period during which each mouse was placed into an open field chamber. The total horizontal distances traveled during stages (1) and (3) were collected. The percent change in the total distance traveled between the first and second tests. As shown in FIG. 21A, the wild-type mice treated with saline traveled an average of about 20% less during stage (3) relative to stage (1); the mdx mice treated with saline traveled an average of about 70% less during stage (3) relative to stage (1); the mdx mice treated with MDX-ASO traveled an average of about 85% less during stage (3) relative to stage (1); and the mdx mice treated with MDX-ASO-Complex traveled an average of about 40% less during stage (3) relative to stage (1). When compared to wild-type mice treated with saline, mdx mice treated with saline performed significantly worse (as indicated by a significant decrease in distance traveled in stage (3) relative to stage (1)). This observation is consistent with the impaired motor function experienced by DMD patients. mdx mice treated with MDX-ASO showed the same compromised functional performance as those treated with vehicle. In contrast, the performance of mdx mice treated with MDX-ASO-Complex was not statistically different from vehicle treated wild-type mice.

[0854] Four weeks after injection, the activity of all treated mice was determined using a cage running wheel test. Each mouse was individually placed into cages with a running wheel for a 24-hour period. The 24-hour period involved five hours of light on followed by thirteen hours of darkness, and ending with six hours of light. The total distance traveled (in meters, m) by each mouse on the running wheel was continuously collected throughout the 24-hour period and subsequently binned into discrete one-hour increments. As shown in FIG. 21B, the distance traveled by the mdx mice treated with MDX-ASO-Complex closely mirrors the total distance traveled by the wild-type mice treated with saline during the dark period (i.e., when mice are active). This is in contrast to the mdx mice treated with either saline or MDX-ASO, which traveled considerably shorter distances during the dark period.

[0855] All mice in this Example were further tested for creatine kinase activity levels two weeks and four weeks after injection. Wild-type mice do not secrete large amounts of creatine kinase from muscle tissues. Conversely, mdx mice (having diseased muscle tissues) do secrete high levels of creatine kinase, which can be observed by determination of creatine kinase enzymatic activities. As shown in FIG. 21C, the mdx mice that were treated with saline had approximately 9- and 10- fold more creatine kinase enzymatic activity relative to wild-type mice treated with saline after two and four weeks, respectively. Dosing with naked ASO provided no significant benefit to the mdx mice. However, dosing mdx mice with MDX-ASO-Complex did provide a statistically significant reduction in levels of creatine kinase activity after both two and four weeks.

[0856] These surprising results show that MDX-ASO-Complex is capable of providing functional benefits to mice suffering from a DMD phenotype (mdx mice), such that these mice have phenotypic indicators resembling healthy (wild-type) mice. The performance of MDX-ASO-Complex relative to the naked PMO (MDX-ASO) demonstrates that the anti-transferrin receptor antibody of MDX-ASO-Complex is responsible for providing the functional benefits shown in this Example.

### Example 15: Selected Antisense Oligonucleotides Provided Dose-Dependent Reduction in DMPK Expression in DM1 and NHP Myotubes

[0857] The antisense oligonucleotides were further assessed to identify oligos that are safe in vivo (e.g., as indicated by low immunogenicity as measured by cytokine induction), and further based on manufacturability and secondary structure considerations. Three antisense oligonucleotides, GCGUAGAAGGGCGUCUGCCC (SEQ ID NO: 329, DMPK-ASO-1), CCCAGCGCCCACCAGUCACA (SEQ ID NO: 330, DMPK-ASO-2), and CCAUCUCGGCCGGAAUCCGC (SEQ ID NO: 331, DMPK-ASO-3) were selected. These oligonucleotides were then further evaluated for their ability to reduce DMPK expression in DM1 myotubes and NHP myotubes in a dose-responsive manner. The tool compound control DMPK-ASO was used as control. Each of the antisense oligonucleotides were capable of dose-dependently reducing DMPK in DM1 and NHP myotubes (see FIGS. 22A-22C and FIGS. 23A-23B, respectively).

[0858] These data demonstrate that these antisense oligonucleotides are safe in vivo and are capable of dose-dependent reduction of DMPK in cellulo, suggesting that muscle-targeting complexes comprising these antisense oligonucleotides would be capable of targeting DMPK in muscle tissues in vivo.

### Example 16: Binding Affinity of Selected Anti-TfRl Antibodies in Table 2 to Human TfR1

[0859] Selected anti-TfR1 antibodies were tested for their binding affinity to human TfR1 for measurement of Ka (association rate constant), Kd (dissociation rate constant), and K_{D} (affinity). Two known anti-TfR1 antibodies were used as control, 15G11 and OKT9. The binding experiment was performed on Carterra LSA at 25C. An anti-mouse IgG and antihuman IgG antibody “lawn” was prepared on a HC30M chip by amine coupling. The IgGs were captured on the chip. Dilution series of hTfR1, cyTfR1, and hTfR2 were injected to the chip for binding (starting from 1000 nM, 1:3 dilution, 8 concentrations).

[0860] Binding data were referenced by subtracting the responses from a buffer analyte injection and globally fitting to a 1:1 Langmuir binding model for estimate of Ka (association rate constant), Kd (dissociation rate constant), and K_{D} (affinity) using the CarterraTM Kinetics software. 5-6 concentrations were used for curve fitting.

[0861] The result showed that the mouse mAbs demonstrated binding to hTfR1 with K_{D} values ranging from 13 pM to 50 nM. A majority of the mouse mAbs had K_{D} values in the single digit nanomolar to sub-nanomolar range. The tested mouse mAbs showed cross-reactive binding to cyTfR1 with K_{D} values ranging from 16 pM to 22 nM.

[0862] Ka, Kd, and K_{D} values of anti-TfR1 antibodies are provided in Table 12.

TABLE 12

Ka, Kd, and K_{D} values of anti-TfR1 antibodies

| | | | |
|---|---|---|---|
| Name | K_{D}(M) | Ka (M) | Kd (M) |
| ctrl-15G11 | 2.83E-10 | 3.70E+05 | 1.04E-04 |
| ctrl-OKT9 mIgG | 5.36E-10 | 7.74E+05 | 4.15E-04 |
| 3-A04 | 4.36E-10 | 4.47E+05 | 1.95E-04 |
| 3-M12 | 7.68E-10 | 1.66E+05 | 1.27E-04 |
| 5-H12 | 2.08E-07 | 6.67E+04 | 1.39E-02 |
| 10-H02 | 2.72E-09 | 1.26E+05 | 3.42E-04 |
| 10-P05 | 1.63E-09 | 1.70E+05 | 2.78E-04 |
| 2-H19 | 2.06E-09 | 2.22E+05 | 4.56E-04 |
| 3-E05 | 4.55E-10 | 2.20E+04 | 1.00E-05 |
| 3-F03 | 2.23E-09 | 1.38E+05 | 3.09E-04 |
| 3-M09 | 2.54E-09 | 1.50E+05 | 3.82E-04 |
| 3-P24 | 9.70E-10 | 6.72E+04 | 6.52E-05 |
| 4-C05 | 1.61E-09 | 3.01E+04 | 4.85E-05 |
| 4-H04 | 1.39E-08 | 6.17E+04 | 8.57E-04 |
| 4-012 | 1.80E-09 | 7.98E+04 | 1.43E-04 |
| 6-D03 | 9.86E-10 | 1.08E+05 | 1.07E-04 |
| 8-D15 | 8.22E-09 | 3.13E+04 | 2.57E-04 |
| 8-K06 | 6.94E-11 | 1.44E+05 | 1.00E-05 |
| 8-017 | 1.83E-09 | 4.99E+04 | 9.12E-05 |
| 9-C04 | 1.41E-08 | 4.10E+04 | 5.75E-04 |
| 9-D04 | 5.86E-09 | 4.20E+04 | 2.46E-04 |
| 9-K23 | 4.01E-10 | 5.40E+04 | 2.17E-05 |

### Example 16: Conjugation of Anti-TfRl Antibodies With Oligonucleotides

[0863] Complexes containing an anti-TfRl antibody covalently conjugated to an antisense oligonucleotide (ASO) targeting DMPK (control DMPK-ASO) were generated. First, Fab′ fragments of anti-TfR antibody clones 3-A4, 3-M12, 5-H12, 8-K6, 9-K23, 3-E5, 6-D3, 4-012, 4-C5, 10-P5, 2-H19, 3-F3, 8-017, 3-M9, 10-H2, 4-J22, 9-D4, 8-D15, 4-H4, and 9-C4 were prepared by cutting the mouse monoclonal antibodies with an enzyme in or below the hinge region of the full IgG followed by partial reduction. The Fab’s were confirmed to be comparable to mAbs in avidity or affinity

[0864] Muscle-targeting complexes was generated by covalently linking the anti-TfR mAbs to an ASO targeting DMPK via a cathepsin cleavable linker. Briefly, a Bicyclo[6.1.0]nonyne-PEG3-L-valine-L-citrulline-pentafluorophenyl ester (BCN-PEG3-Val-Cit-PFP) linker molecule was coupled to DMPK-targeting ASO through a carbamate bond. Excess linker and organic solvents were removed by tangential flow filtration (TFF). The purified Val-Cit-linker-ASO was then coupled to an azide functionalized anti-transferrin receptor antibody generated through modifying ε-amine on lysine with Azide-PEG4-PFP. A positive control muscle-targeting complex was also generated using 15G11.

[0865] The product of the antibody coupling reaction was then subjected to two purification methods to remove free antibody and free payload: 1) hydrophobic interaction chromatography (HIC-HPLC), and 2) Size exclusion chromatography (SEC). The HIC column utilized a decreasing salt gradient to separate free antibody from conjugate. During SEC, fractionation was performed based on A260/A280 traces to specifically collect conjugated material. Concentrations of the conjugates were determined by either Nanodrop A280 or BCA protein assay (for antibody) and Quant-It Ribogreen assay (for payload). Corresponding drug-antibody ratios (DARs) were calculated. DARs ranged between 0.8 and 2.0, and were standardized so that all samples receive equal amounts of payload.

[0866] The purified complexes were then tested for cellular internalization and inhibition of DMPK. Non-human primate (NHP) or DM1 (donated by DM1 patients) cells were grown in 96-well plates and differentiated into myotubes for 7 days. Cells were then treated with escalating concentrations (0.5 nM, 5 nM, 50 nM) of each complex for 72 hours. Cells were harvested, RNA was isolated, and reverse transcription was performed to generate cDNA. qPCR was performed using TaqMan kits specific for Ppib (control) and DMPK on the QuantStudio 7. The relative amounts of remaining DMPK transcript in treated vs non-treated cells was were calculated and the results are shown in Table 13 and FIG. 24.

[0867] The results demonstrated that the anti-TfRl antibodies are able to target muscle cells, be internalized by the muscle cells with the molecular payload (DMPK ASO), and that the molecular payload (DMPK ASO) are able to target and knockdown the target gene (DMPK). Knockdown activity of a complex comprising the anti-TfRl antibody conjugated to a molecular payload (e.g., an oligonucleotide) targeting any of the other rare muscle disease genes listed in Table 1 can be tested using the same assay described herein.

TABLE 13

Binding Affinity of anti-TfRl Antibodies and Efficacy of Conjugates

| | | | | |
|---|---|---|---|---|
| Clone Name | huTfR1 Avg K_{D} (M) (antibody alone) | cyTfR1 Avg K_{D} (M) (antibody alone) | % knockdown of DMPK in NHP cells using Antibody-DMPK ASO conjugate | % knockdown of DMPK in cells from human DM1 patients using Antibody-DMPK ASO conjugate |
| 15G11 (control) | 8.0E-10 | 1.0E-09 | 36 | 46 |
| 3-A4 | 4.36E-10 | 2.32E-09 | 77 | 70 |
| 3-M12 | 7.68E-10 | 5.18E-09 | 77 | 52 |
| 5-H12 | 2.02316E-07 | 1.20E-08 | 88 | 57 |
| 8-K6 | 6.78121E-11 | 3.76E-10 | 73 | 34 |
| 9-K23 | 3.19783E-10 | 6.62E-10 | 47 | -4 |
| 3-E5 | 4.55E-10 | 6.71E-10 | 59 | 71 |
| 6-D3 | 9.86E-10 | 7.78E-10 | -8 | -5 |
| 4-012 | 1.27416E-09 | 2.70E-07 | -16 | 10 |
| 4-C5 | 1.38324E-09 | 1.36E-08 | -20 | 35 |
| 10-P5 | 1.63E-09 | 1.10E-08 | 58 | 55 |
| 2-H19 | 2.06E-09 | 5.75E-09 | 39 | 24 |
| 3-F3 | 2.23E-09 | 1.84E-08 | -15 | 20 |
| 8-017 | 2.24245E-09 | 1.10E-09 | 26 | 41 |
| 3-M9 | 2.50135E-09 | 4.37E-09 | 52 | 39 |
| 10-H2 | 2.72E-09 | 1.24E-08 | 2 | 16 |
| 4-J22 | 3.41E-09 | 1.37E-09 | 7 | 57 |
| 9-D4 | 5.79556E-09 | 8.68E-10 | 42 | 62 |
| 8-D15 | 9.15057E-09 | 1.11E-08 | * | * |
| 4-H4 | 1.39E-08 | 2.18E-08 | * | * |
| 9-C4 | 1.47657E-08 | 1.20E-08 | * | * |

* very low yield from expression/conjugation

[0868] Interestingly, the DMPK knockdown results showed a lack of correlation between the binding affinity of the anti-TfR to transferrin receptor and efficacy in delivering a DMPK ASO to cells for DMPK knockdown. Surprisingly, the anti-TfR antibodies provided herein (e.g., at least 3-A4, 3-M12, 5-H12, 8-K6, 3-E5, 10-P5, 3-M9, and 9-D4) demonstrated superior activity in delivering a payload (e.g., DMPK ASO) to the target cells and achieving the biological effect of the molecular payload (e.g., DMPK knockdown) in either cyno cells or human DM1 patient cells, compared to the control antibody 15G11, despite the comparable binding affinity (or, in certain instances, such as 5-H12, lower binding affinity) to human or cyno transferrin receptor between these antibodies and the control antibody 15G11.

[0869] Top attributes such as high huTfR1 affinity, >50% knockdown of DMPK in NHP and DM1 patient cell line, identified epitope binding with 3 unique sequences, low/no predicted PTM sites, and good expression and conjugation efficiency were considered for the selection of clones for humanization.

### Example 17. Binding Activities of the Anti-TfRl Antibodies

[0870] The screen identified 1 scFv clone (shown in Table 7), which was reformatted into different formats. The binding activity of selected formats were tested against human TfRl, cyno TfRl, and human TfR2 in an ELISA assay. 15G11 was used as control in this experiment. The results show that all tested antibodies bind to human TfRl and cyno TfRl (FIGS. 25A-25C, but do not bind to human TfR2 (FIG. 26). The EC50 values for each tested antibody are provided in Table 14.

TABLE 14

EC50 (nM) values for anti-TfR antibodies

| | 15G11 | ScFv | hIgG1 (with L234A/L235A mutations in HC constant region) | FAB | scFv_C_Fc |
|---|---|---|---|---|---|
| Cyno TfRl | 1.08 | 14.75 | 22.01 | 63.89 | 27.21 |
| Human TfRl | 0.589 | 24.8 | 75.83 | 101.9 | 49.56 |

### Example 18: Conjugation of Anti-TfRl Antibodies With Oligonucleotides

[0871] Complexes containing an anti-TfRl Fab described herein (Table 7) covalently conjugated to an antisense oligonucleotide (ASO) targeting DMPK were generated. A Fab′ fragment of a known anti-TfR antibody, 15G11 was generated and used to produce a complex as positive control.

[0872] Muscle-targeting complexes was generated by covalently linking the anti-TfR antibodies to control DMPK-ASO via a cathepsin cleavable linker. The purified Val-Cit-linker-ASO was coupled to functionalized anti-transferrin receptor antibodies generated through modifying ε-amine on lysine of the antibody.

[0873] The product of the antibody coupling reaction was then subjected to two purification methods to remove free antibody and free payload: 1) hydrophobic interaction chromatography (HIC-HPLC), and 2) Size exclusion chromatography (SEC). The HIC column utilized a decreasing salt gradient to separate free antibody from conjugate. During SEC, fractionation was performed based on A260/A280 traces to specifically collect conjugated material. Concentrations of the conjugates were determined by either Nanodrop A280 or BCA protein assay (for antibody) and Quant-It Ribogreen assay (for payload). Corresponding drug-antibody ratios (DARs) were calculated. DAR was about 2.05.

[0874] The purified complexes were then tested for cellular internalization and inhibition of DMPK. Non-human primate (NHP) or DM1 (donated by DM1 patients) cells were grown in 96-well plates and differentiated into myotubes for 7 days. Cells were then treated with escalating concentrations (0.5 nM, 5 nM, 50 nM) of each complex for 72 hours. Cells were harvested, RNA was isolated, and reverse transcription was performed to generate cDNA. qPCR was performed using TaqMan kits specific for Ppib (control) and DMPK on the QuantStudio 7. The relative amounts of remaining DMPK transcript in treated vs non-treated cells was were calculated and the results are shown in FIG. 27. The complex containing anti-TfR Fab described herein achieved comparable DMPK knockdown as the complex containing 15G11.

[0875] The results demonstrated that the anti-TfRl antibodies are able to target muscle cells, be internalized by the muscle cells with the molecular payload (DMPK ASO), and that the molecular payload (DMPK ASO) are able to target and knockdown the target gene (DMPK). Knockdown activity of a complex comprising the anti-TfRl antibody conjugated to a molecular payload (e.g., an oligonucleotide) targeting any of the other rare muscle disease genes listed in Table 1 can be tested using the same assay described herein.

### Example 19. Binding and Biological Activity of Anti-TfR-oligonucleotide Conjugates

[0876] The anti-TfR antibody described herein (e.g., as in Table 7) alone or in a conjugate where the antibody was conjugated to a DMPK-targeting oligonucleotide (control DMPK-ASO) were tested for binding to human (FIG. 28A) and cynomolgus monkey (FIG. 28B) TfRl. Results demonstrate that binding of the anti-TfR antibody to both hTfR1 and cynoTfR1 increases 3-6-fold upon conjugation to DMPK-targeting oligonucleotide.

[0877] The conjugate was also tested in cellular uptake experiments to evaluate TfRl-mediated internalization. To measure such cellular uptake mediated by antibodies, the anti-TfR antibody was conjugated to several different DMPK-targeting oligonucleotides, and the conjugate were labeled with Cypher5e, a pH-sensitive dye. Rhabdomyosarcoma (RD) cells were treated for 4 hours with 100 nM of the conjugates, trypsinized, washed twice, and analyzed by flow cytometry. Mean Cypher5e fluorescence (representing uptake) was calculated using Attune NxT software. As shown in FIG. 29, the anti-TfR antibody show endosomal uptake. Similar internalization efficiency were observed for different oligonucleotide payloads. An anti-mouse TfR antibody was used as the negative control. Cold (non-internalizing) conditions abrogated the fluorescence signal of the positive control antibody-conjugate (data not shown), indicating that the positive signal in the positive control and humanized anti-TfR Fab-conjugates is due to internalization of the Fab-conjugates.

[0878] The activity of the conjugate containing the anti-TfR antibody and the DMPK-targeting oligonucleotide control DMPK-ASO in knocking down DMPK mRNA level in RD cells was also tested. The results showed that the conjugated achieved dose-dependent knock down of DMPK mRNA level (FIG. 30).

[0879] The results demonstrate that the anti-TfRl antibody bind to TfRl on muscles with high affinity, can mediate the internalized of a conjugated molecular payload (e.g., oligonucleotide) and that the molecular payload (DMPK-targeting oligonucleotide) are able to target and knockdown the target gene (DMPK). Molecular payloads targeting other genes can also be conjugated to the anti-TfR antibody described herein and used to target other genes specifically in muscle cells.

### Example 20. Serum Stability of the Linker Linking the Anti-TfR Antibody and the Molecular Payload

[0880] Oligonucleotides which were linked to antibodies in examples were conjugated via a cleavable linker shown in Formula (C). It is important that the linker maintain stability in serum and provide release kinetics that favor sufficient payload accumulation in the targeted muscle cell. This serum stability is important for systemic intravenous administration, stability of the conjugated oligonucleotide in the bloodstream, delivery to muscle tissue and internalization of the therapeutic payload in the muscle cells. The linker has been confirmed to facilitate precise conjugation of multiple types of payloads (including ASOs, siRNAs and PMOs) to Fabs. This flexibility enabled rational selection of the appropriate type of payload to address the genetic basis of each muscle disease. Additionally, the linker and conjugation chemistry allowed the optimization of the ratio of payload molecules attached to each Fab for each type of payload, and enabled rapid design, production and screening of molecules to enable use in various muscle disease applications.

[0881] FIG. 31 shows serum stability of the linker in vivo, which was comparable across multiple species over the course of 72 hours after intravenous dosing. At least 75% stability was measured in each case at 72 hours after dosing.

### Example 21. Knockdown of DMPK mRNA Level Facilitated by Oligonucleotides Conjugates in Vitro

[0882] DMPK-targeting oligonucleotides (e.g., ASO) were tested in rhabdomyosarcoma (RD) cells for knockdown of DMPK transcript expression. RD cells were cultured in a growth medium of DMEM with glutamine, supplemented with 10% FBS and penicillin/streptomycin until nearly confluent. Cells were then seeded into a 96 well plate at 20 K cells per well and were allowed to recover for 24 hours. Cells were then treated with free DMPK-targeting oligonucleotides or by transfection of the oligonucleotides using 0.3 µL per well of Lipofectamine MessengerMAX transfection reagent. After 3 days, total RNA was collected from cells, cDNA was synthesized and DMPK expression was measured by qPCR.

[0883] Results in FIG. 32 show that DMPK expression level was reduced in cells treated with each given DMPK-targeting oligonucleotide, relative to expression in PBS-treated cells. Several DMPK-oligonucleotides showed dose-dependent reduction of DMPK expression level. In FIG. 32, DMPK-ASO-1 has the sequence GCGUAGAAGGGCGUCUGCCC (SEQ ID NO: 329). DMPK-ASO-2 has the sequence CCCAGCGCCCACCAGUCACA (SEQ ID NO: 330). DMPK-ASO-3 has the sequence CCAUCUCGGCCGGAAUCCGC (SEQ ID NO: 331). Control DMPK-ASO was also used in this experiment.

### Example 22. Splicing Correction and Functional Efficacy in HSA-LR Mouse Model of DM1

[0884] Correction of splicing in the HSA-LR mouse model of DM1 was demonstrated with conjugates containing anti-TfR antibodies conjugated to oligonucleotides target human skeletal actin (ACTA1). The anti-TfRl used in this study was RI7 217. The oligonucleotide targeting ACTA1 is an 2′-MOE 5-10-5 gapmer that comprises: 5′-NH₂-(CH₂)₆-dA*oC*oC*oA*oT*oT*dT*dT*dC*dT*dT*dC*dC*dA*dC*dA*oG*oG*oG*oC*oT-3 (SEQ ID NO: 259); wherein ‘*’ represents a PS linkage; ‘d’ represents a deoxynucleic acid; and ‘o’ represents a 2′-MOE.

[0885] The HSA-LR DM1 mouse model is a well-validated model of DM1 that exhibits pathologies that are very similar to human DM1 patients. The HSA-LR model uses the human skeletal actin (ACTA1) promoter to drive expression of CUG long repeats (LR). In this model, toxic DMPK RNA accumulates within the nucleus and sequesters proteins responsible for splicing, such as Muscleblind-like protein (MBNL), resulting in mis-splicing of multiple RNAs, including CLCN1 (chloride channel), ATP2a1 (calcium channel), and others. This mis-splicing causes the mice to also exhibit myotonia which is a hallmark of the DM1 clinical presentation in humans.

[0886] The anti-TfR-oligonucleotide conjugate delivered intravenously has previously been shown to have activity in dose-dependent correction of splicing in multiple RNAs and multiple muscles and was well tolerated by HSA-LR mice. In this study, the ability of the conjugates to correct splicing in more than 30 different RNAs was evaluated. DM1, significant RNA mis-splicing of these RNAs reduces the ability of multiple muscles′ function. The RNAs monitored are critical for contraction and relaxation of muscle in HSA-LR mice. Dose-dependent correction of splicing was observed. In

[0887] FIG. 33 shows results for Atp2a1, which encodes a calcium channel and contributes to muscle contraction and relaxation. The X-axis represents splice derangement with 1.00 representing severe mis-splicing and 0.00 representing a wild type (WT) splice pattern. Progression from right to left in the figure represents a correction of splicing. The Y-axis represents the percent of the gene spliced in (PSI). Severe mis-splicing of ATP2a1 is caused by exclusion of exon 22 in the ATP2a1 RNA. WT splicing reflects near complete inclusion of exon 22. Results demonstrate that the conjugate corrected splicing of ATP2a1 in a dose-dependent manner in the gastrocnemius muscle.

[0888] Data for the more than 30 different RNAs that were tested in this study are shown in FIGS. 34A-34C. Similar dose-dependent correction of splicing was achieved for all of the tested RNAs in gastrocnemius muscle. For some of these RNAs, correction of splicing is reflected by a decrease in PSI, as in FIG. 33, and for other RNAs correction is reflected by an increase in PSI.

[0889] Similar dose-dependent improvements in splicing within the set of RNAs were observed in the quadriceps and tibialis anterior muscles, after treatment with the conjugate. FIG. 35 shows composite levels of splicing derangement observed for saline and different doses of the Ab-ASO across the more than 30 RNAs that were tested in each muscle type. Doses of 10 mg/kg and 20 mg/kg were administered in this study.

[0890] In addition to reductions in splicing derangement across multiple genes in several muscles in the HSA-LR model, disease modification was observed in the HSA-LR model. The results in FIG. 36 show that almost complete reversal of myotonia was achieved after a single dose of the conjugate. The severity of myotonia on a four-point scale was evaluated 14 days following dosing with saline (PBS), naked oligonucleotide, or the conjugate. Grade 0 indicates no myotonia was observed, grade 1 indicates myotonic discharge was measured by electromyography (EMG) in less than 50% of needle insertions, grade 2 indicates myotonic discharge was measured in greater than 50% of needle insertions and grade 3 indicates myotonic discharge was measured with nearly every needle insertion.

### Example 23. DMPK-Targeting PMOs

[0891] Additional DMPK targeting oligonucleotides (PMOs) were designed and tested for their activity in reducing DMPK expression in primary human myotubes. Wild-type primary myoblasts were cultured in PromoCell Skeletal Muscle growth medium with 5% FBS and penicillin/streptomycin until nearly confluent. Cells were then seeded into a 96 well plate at 50000 cells per well and allowed to recover for 24 hours. Cells were then differentiated in a differentiation medium of DMEM with glutamine and penicillin/streptomycin for 7 days. Cells were then treated with the unconjugated PMO for 3 days. Total RNA was collected from cells, cDNA was synthesized and DMPK expression was measured by qPCR. The sequences of the PMOs and their activity in knocking down DMPK in vitro are shown in Table 15.

TABLE 15

DMPK-targeting PMOs and activity in knocking down DMPK in vitro

| PMO # | PMO Sequence | Target region | % DMPK Knockdown in Primary Human Myotubes |
|---|---|---|---|
| 1 | CAGGTGACAGTTCAGGTGCAG (SEQ ID NO: 309) | intron 1-2 | 59% |
| 2 | TCCACCCTGACTCCAGGTGAC (SEQ ID NO: 310) | intron 1-2 | 16% |
| 3 | GAGAAGGAAATAAGACCCAGTT (SEQ ID NO: 311) | intron 1-2 | 14% |
| 4 | CCTTCTCTCTGCCTCTCAGCTT (SEQ ID NO: 312) | intron 1-2 | 58% |
| 5 | CCACCCTCTGTCTGTCTCC (SEQ ID NO: 313) | intron 1-2 | 64% |
| 6 | TCCGCTGGGTGGTGGGAAAAGAA (SEQ ID NO: 314) | Exon 2 | 9% |
| 7 | ATGGGCTCCGCTGGGTGGTGG (SEQ ID NO: 315) | Exon 2 | 11% |
| 8 | ACGATGGGCTCCGCTGGG (SEQ ID NO: 316) | Exon 2 | 60% |
| 9 | CCATCCTTGGGCAGAGACCT (SEQ ID NO: 317) | Intron 4-5 | 41% |
| 10 | ATGACCAGGTACTGAGAAGGG (SEQ ID NO: 318) | Exon 5 | 33% |
| 11 | AGGTACTGAGAAGGGTTCGTC (SEQ ID NO: 319) | Exon 5 | 40% |
| 12 | TAGGGACCTGCGGAGAGGGCGA | Exon 15 | 35% |
| | (SEQ ID NO: 320) | | |
| 13 | GCCTAGGGACCTGCGGGAGAG (SEQ ID NO: 321) | Exon 15 | 62% |
| 14 | GCCTTTTATTCGCGAGGGTCGG (SEQ ID NO: 322) | polyA | 73% |
| 15 | TGGAGGGCCTTTTATTCGCGAGG (SEQ ID NO: 323) | polyA | 66% |
| 39 | TAGGCACTCACCCACTGCAAGA (SEQ ID NO: 324) | Exon 1 | 69% |
| 40 | CGGAGCTCACCAGGTAGTTCT (SEQ ID NO: 325) | Intron 4-5 | 73% |
| 41 | AGGGCAGTGCTTACCTGAGGG (SEQ ID NO: 326) | Intron 9-10 | 57% |

### Example 24. Anti-TfR-oligonucleotide Conjugate Treatment Increased Dystrophin Expression in Mdx Mouse Model of DMD

[0892] To test the effects of another oligonucleotide that induces DMD exon skipping in vivo, an oligonucleotide (PMO) that induces exon 23 skipping was administered as naked oligonucleotide or in conjugate with an anti-mouseTfR antibody to the mdx mouse model of DMD. Dystrophin expression was measured. The exon skipping promoted by the conjugate resulted in dose-dependent production of dystrophin protein as illustrated by Western blot (FIG. 38) and quantified in FIG. 39. Alpha-actin was used as a loading control.

[0893] A single dose of the exon 23-conjugate administered in the mdx mouse also restored dystrophin expression to the muscle cell membrane in addition to increasing overall dystrophin levels, as shown in FIG. 40. Immunofluorescence staining of dystrophin in quadricep muscles demonstrated that mdx mice treated with the conjugated had higher levels of dystrophin in their quadriceps than mice treated with naked oligonucleotide or saline.

### Example 25. Oligonucleotide-mediated Exon Skipping in DMD Myotubes

[0894] Promoting the skipping of specific DMD exons in the nucleus could allow muscle cells to create more complete, functional dystrophin protein. An oligonucleotide (PMO) that induces skipping of DMD exon 51 was conjugated to an anti-TfRl Fab and the conjugated was tested in man DMD myotubes with a mutation amenable to Exon 51 skipping. Treatment with the conjugate resulted in a 50% increase in exon skipping as compared to a 25% increase in exon skipping following treatment with an equimolar dose of the naked oligonucleotide (p-value=0.001), as shown in FIG. 37.

### Example 26. Functional Activity of Antibody-conjugated Oligonucleotides Targeting DUX4 for Treating FSHD.

[0895] FSHD patient-derived myotubes were treated with FM-10 conjugated to an anti-TfRl Fab or naked FM-10. FM-10 has the sequence 5′-GGGCATTTTAATATATCTCTGAACT-3′ (SEQ ID NO: 260). Expression of mRNA transcribed from three genes known to be only expressed following DUX4 activation was subsequently measured in the myotubes. Expression of these three DUX4-associated genes was reduced, as shown in FIG. 41A (naked oligonucleotide) and 41B (Ab-oligonucleotide). In addition, the half maximal concentration required to inhibit (IC₅₀) values for the conjugate were up to 9.6 times lower than those observed for naked FM-10, as shown in Table 16 below, demonstrating that the conjugates was up to 9.6 times more potent than naked FM-10 in suppressing DUX4-associated gene expression.

[0896] Additional anti-DUX4 oligonucleotides that may also be used to suppress DUX4-associated genes are ACUGCGCGCAGGUCUAGCCAGGAAG (SEQ ID NO: 327) and UGCGCACUGCGCGCAGGUCUAGCCAGGAAG (SEQ ID NO: 328).

TABLE 16

IC₅₀ values for inhibition of DUX4-associated genes.

| Transcript | Ab-FM-10 IC₅₀ (nM) | Naked FM-10 IC₅₀ (nM) | Fold Improvement with Ab conjugation |
|---|---|---|---|
| ZSCAN4 | 67 | 643 | 9.6x |
| MBD3L2 | 144 | 1208 | 8.4x |
| TRIM43 | 352 | 1117 | 3.2x |

### Example 27: Exon-Skipping Activity of Anti-TfR Conjugates in DMD Patient Myotubes

[0897] In this study, the exon-skipping activities of anti-TfR conjugates containing an anti-TfR Fab′ (a control anti-TfR Fab′ or an anti-TfR Fab′ comprising a HC of SEQ ID NO: 308 and a LC of SEQ ID NO: 212) conjugated to a DMD exon51-skipping oligonucleotide were evaluated. Immortalized human myoblasts bearing an exon 52 deletion or an exon 48-50 deletion were thawed and seeded at a density of 1e6 cell/flask in Promocell Skeletal Cell Growth Media (with 5% FBS and 1x Pen-Strep) and allowed to grow to confluency. Once confluent, cells were trypsinized and pelleted via centrifugation and resuspended in fresh Promocell Skeletal Cell Growth Media. The cell number was counted and cells were seeded into Matrigel-coated 96-well plates at a density of 50000 cells/well. Cells were allowed to recover for 24 hours. Cells were induced to differentiate by aspirating the growth media and replacing with differentiation media with no serum. Cells were then treated with conjugated or unconjugated DMD exon skipping oligonucleotide at 10 µM. Cells were incubated with test articles for ten days then total RNA was harvested from the 96 well plates. cDNA synthesis was performed on 75 ng of total RNA, and mutation specific PCRs were performed to evaluate the degree of exon 51 skipping in each cell type. Mutation-specific PCR products were run on a 4% agarose gel and visualized using SYBR gold. Densitometry was used to calculate the relative amounts of the skipped and unskipped amplicon and exon skipping was determined as a ratio of the Exon 51 skipped amplicon divided by the total amount of amplicon present:

$$\% E x o n S k i p p i n g = \frac{S k i p p e d A m p l i c o n}{( S k i p p e d A m p l i c o n + U n s k i p p e d A m p l i c o n} ∗ 100$$

[0898] The data demonstrates that conjugates resulted in enhanced exon skipping compared to the unconjugated DMD exon skipping oligonucleotide in patient myotubes (FIG. 42).

### Example 28: In Vivo Activity of Anti-TfR Conjugates in hTfR1 Mice

[0899] In DM1, the higher than normal number of CUG repeats form large hairpin loops that remain trapped in the nucleus, forming nuclear foci that bind splicing proteins and inhibit the ability of splicing proteins to perform their normal function. When toxic nuclear DMPK levels are reduced, the nuclear foci are diminished, releasing splicing proteins, allowing restoration of normal mRNA processing, and potentially stopping or reversing disease progression.

[0900] The in vivo activity of conjugates containing an anti-TfR Fab′ (a control anti-TfR Fab′ or an anti-TfR Fab′ comprising a HC of SEQ ID NO: 308 and a LC of SEQ ID NO: 212) conjugated to the DMPK-targeting oligonucleotide control DMPK-ASO in reducing DMPK mRNA level in multiple muscle tissues following systemic intravenous administration in mice was evaluated.

[0901] Male and female C57BL/6 mice where one TfRl allele was replaced with a human TFR1 allele were administered between the ages of 5 and 15 weeks according to the dosing schedule outlined in Table 17. Mice were sacrificed 14 days after the first injection and selected muscles collected as indicated in Table 18.

TABLE 17

| Group | Animal No. | Treatment Antibody | Treatment Oligo | Dose Level (mg/kg) | Dose Volume (mL/kg) | Dosing Regimen | Terminal Time Point |
|---|---|---|---|---|---|---|---|
| 1 | 4 | Vehicle | NA | 0 | 10 | Day 0 and Day 7 by IV | Day 14 |
| 2 | 4 | NA | control DMPK-ASO | 10 | 5.0 | | |
| 3 | 4 | control anti-TfR Fab′ | control DMPK-ASO | | 10.2 | | |
| 4 | 4 | anti-TfR having HC of SEQ ID NO: 308 and LC of SEQ ID NO: 212 | control DMPK-ASO | | 9.1 | | |

TABLE 18

| | |
|---|---|
| Tissue | Storage |
| Gastrocnemius | Right leg of each animal stored in RNALater at -80° C. |
| Tibialis Anterior | One leg (R) of each animal stored in RNALater at -80° C. |
| Heart | Dissect transversally and store the apex in RNAlater at -80° C. |
| Diaphragm | Split in half and collect one half in RNAlater at -80° C. |

[0902] Total RNA was extracted on a Maxwell Rapid Sample Concentrator (RSC) Instrument using kits provided by the manufacturer (Promega). Purified RNA was reverse-transcribed and levels of Dmpk and Ppib transcripts determined by qRT-PCR with specific TaqMan assays (ThermoFIsher). Log fold changes in Dmpk expression were calculated according to the 2^{-ΔΔCT} method using Ppib as the reference gene and mice injected with vehicle as the control group. Statistical significance in differences of Dmpk expression between control mice and mice administered with the conjugates were determined by one-way ANOVA with Dunnet’s correction for multiple comparisons. As shown in FIGS. 43A-43D, the tested conjugates showed robust activity in reducing DMPK mRNA level in vivo in various muscle tissues.

### Example 29: In Vitro Activity of anti-TfR Conjugates in Patient-Derived Cells

[0903] An in vitro experiment was conducted to determine the activities of anti-TfR conjugates in reducing DMPK mRNA expression, correcting BIN1 splicing, and reducing nuclear foci in CM-DM1-32F primary cells expressing a mutant DMPK mRNA containing 380 GTG repeats. The CM-DM1-32F primary cell is an immortalized myoblastic cell line isolated from a DM1 patient (CL5 cells; Described in Arandel et al., Dis Model Mech. 2017 Apr 1; 10(4): 487-497). Conjugate 1 contains an anti-TfR mAb conjugated to DMPK-targeting oligonucleotide (control DMPK-ASO). Conjugate 2 contains an anti-TfR Fab′ conjugated to DMPK-ASO-1 (GCGUAGAAGGGCGUCUGCCC; SEQ ID NO: 329).

[0904] CL5 cells were seeded at a density of 156,000 cells/cm², allowed to recover for 24 hours, transferred to differentiation media to induce myotube formation, as described (Arandel et al.) and subsequently exposed to conjugate 1 and conjugate 2 at a payload concentration of 500 nM. Parallel cultures exposed to vehicle PBS served as controls. Cells were harvested after 10 days of culture.

[0905] For analysis of gene expression, cells were collected with Qiazol for total RNA extraction with a Qiagen miRNAeasy kit. Purified RNA was reverse-transcribed and levels of DMPK, PPIB, BIN1 transcripts and of the BIN1 mRNA isoform containing exon 11 determined by qRT-PCR with specific TaqMan assays (ThermoFIsher). Log fold changes in DMPK expression were calculated according to the 2^{-ΔΔCT} method using PPIB as the reference gene and cells exposed to vehicle as the control group. Log fold changes in the levels BIN1 isoform containing exon 11 were calculated according to the 2^{-ΔΔCT} method using BIN1 as the reference gene and cells exposed to vehicle as the control group.

[0906] To measure the area of mutant DMPK nuclear foci, cells were fixed in 4% formalin, permeabilized with 0.1% Triton X-100 and hybridized at 70° C. with a CAG peptide-nucleic acid probe conjugated to the Cy5 fluorophore. After multiple washes in hybridization buffer and 2xSSC solution, nuclei were counterstained with DAPI. Images were collected at a 400x magnification by confocal microscopy and foci area measured as the area of Cy5 signal contained within the area of DAPI signal. Data were expressed as foci area corrected for nuclear area.

[0907] The results show that a single dose of the conjugates containing an anti-TfR (IgG or Fab′) conjugated to a DMPK-targeting oligonucleotide (control DMPK-ASO or DMPK ASO-1 (SEQ ID NO: 329)) resulted reduced mutant DMPK expression (FIG. 44A), corrected BIN1 splicing (FIG. 44B), and reduced nuclear foci by approximately 40% (FIG. 44C).

### ADDITIONAL EMBODIMENTS

[0908] 1. A method for delivering a molecule payload to a muscle cell in a subject, the method comprising administering to the subject a complex comprising a muscle-targeting agent covalently linked to a molecular payload,

[0909] wherein the muscle targeting agent is an antibody that binds to a transferrin receptor and comprises a heavy chain variable region (VH) comprising a CDR-H1, a CDR-H2, and a CDR-H3 of any one of the antibodies listed in Table 2, Table 4, or Table 7, and/or a light chain variable region (VL) comprising a CDR-L1, a CDR-L2, and a CDR-L3 of any one of the antibodies listed in Table 2, Table 4, or Table 7.

[0910] 2. The method of embodiment 1, wherein the antibody comprises a VH that is at least 85% identical to the VH of any one of the antibodies listed in Table 2 or Table 7, and/or a VL that is at least 85% identical to the VL of any one of the antibodies listed in Table 2 or Table 7.

[0911] 3. The method of embodiment 1, wherein the antibody is selected from:
[0912] (i) an antibody comprising a CDR-H1, a CDR-H2, and a CDR-H3 of a VH comprising the amino acid sequence of SEQ ID NO: 7, and/or a CDR-L1, a CDR-L2, and a CDR-L3 of a VL comprising the amino acid sequence of SEQ ID NO: 8;
[0913] (ii) an antibody comprising a CDR-H1, a CDR-H2, and a CDR-H3 of a VH comprising the amino acid sequence of SEQ ID NO: 15, and/or a CDR-L1, a CDR-L2, and a CDR-L3 of a VL comprising the amino acid sequence of SEQ ID NO: 16;
[0914] (iii) an antibody comprising a CDR-H1, a CDR-H2, and a CDR-H3 of a VH comprising the amino acid sequence of SEQ ID NO: 23, and/or a CDR-L1, a CDR-L2, and a CDR-L3 of a VL comprising the amino acid sequence of SEQ ID NO: 24; and
[0915] (iv) an antibody comprising a CDR-H1, a CDR-H2, and a CDR-H3 of a VH comprising the amino acid sequence of SEQ ID NO: 204, and/or a CDR-L1, a CDR-L2, and a CDR-L3 of a VL comprising the amino acid sequence of SEQ ID NO: 205.

[0916] 4. The method of embodiment, wherein the antibody comprises:
[0917] (i) a CDR-H1 of SEQ ID NO: 1, a CDR-H2 of SEQ ID NO: 2, SEQ ID NO: 262, or SEQ ID NO: 80, a CDR-H3 of SEQ ID NO: 3, a CDR-L1 of SEQ ID NO: 4, a CDR-L2 of SEQ ID NO: 5, and a CDR-L3 of SEQ ID NO: 6;
[0918] (ii) a CDR-H1 of SEQ ID NO: 145, a CDR-H2 of SEQ ID NO: 146, SEQ ID NO: 263, or SEQ ID NO: 265, a CDR-H3 of SEQ ID NO: 147, a CDR-L1 of SEQ ID NO: 148, a CDR-L2 of SEQ ID NO: 149, and a CDR-L3 of SEQ ID NO: 6; or
[0919] (iii) a CDR-H1 of SEQ ID NO: 150, a CDR-H2 of SEQ ID NO: 151, SEQ ID NO: 270, or SEQ ID NO: 271, a CDR-H3 of SEQ ID NO: 152, a CDR-L1 of SEQ ID NO: 153, a CDR-L2 of SEQ ID NO: 5, and a CDR-L3 of SEQ ID NO: 154.

[0920] 5. The method of embodiment 1, wherein the antibody comprises:
[0921] (i) a CDR-H1 of SEQ ID NO: 9, a CDR-H2 of SEQ ID NO: 10, a CDR-H3 of SEQ ID NO: 11, a CDR-L1 of SEQ ID NO: 12, a CDR-L2 of SEQ ID NO: 13, and a CDR-L3 of SEQ ID NO: 14;
[0922] (ii) a CDR-H1 of SEQ ID NO: 155, a CDR-H2 of SEQ ID NO: 156, a CDR-H3 of SEQ ID NO: 157, a CDR-L1 of SEQ ID NO: 158, a CDR-L2 of SEQ ID NO: 159, and a CDR-L3 of SEQ ID NO: 14; or
[0923] (iii) a CDR-H1 of SEQ ID NO: 160, a CDR-H2 of SEQ ID NO: 161, a CDR-H3 of SEQ ID NO: 162, a CDR-L1 of SEQ ID NO: 163, a CDR-L2 of SEQ ID NO: 13, and a CDR-L3 of SEQ ID NO: 164.

[0924] 6. The method of embodiment 1, wherein the antibody comprises:
[0925] (i) a CDR-H1 of SEQ ID NO: 17, SEQ ID NO: 266, or SEQ ID NO: 268, a CDR-H2 of SEQ ID NO: 18, a CDR-H3 of SEQ ID NO: 19, a CDR-L1 of SEQ ID NO: 20, a CDR-L2 of SEQ ID NO: 21, and a CDR-L3 of SEQ ID NO: 22;
[0926] (ii) a CDR-H1 of SEQ ID NO: 165, SEQ ID NO: 267, or SEQ ID NO: 269, a CDR-H2 of SEQ ID NO: 166, a CDR-H3 of SEQ ID NO: 167, a CDR-L1 of SEQ ID NO: 168, a CDR-L2 of SEQ ID NO: 169, and a CDR-L3 of SEQ ID NO: 22; or (iii) a CDR-H1 of SEQ ID NO: 170, a CDR-H2 of SEQ ID NO: 171, a CDR-H3 of SEQ ID NO: 172, a CDR-L1 of SEQ ID NO: 173, a CDR-L2 of SEQ ID NO: 21, and a CDR-L3 of SEQ ID NO: 174.

[0927] 7. The method of embodiment 1, wherein the antibody comprises:
[0928] (i) a CDR-H1 of SEQ ID NO: 188, a CDR-H2 of SEQ ID NO: 189, a CDR-H3 of SEQ ID NO: 190, a CDR-L1 of SEQ ID NO: 191, a CDR-L2 of SEQ ID NO: 192, and a CDR-L3 of SEQ ID NO: 193;
[0929] (ii) a CDR-H1 of SEQ ID NO: 194, a CDR-H2 of SEQ ID NO: 195, a CDR-H3 of SEQ ID NO: 196, a CDR-L1 of SEQ ID NO: 197, a CDR-L2 of SEQ ID NO: 198, and a CDR-L3 of SEQ ID NO: 193; or
[0930] (iii) a CDR-H1 of SEQ ID NO: 199, a CDR-H2 of SEQ ID NO: 200, a CDR-H3 of SEQ ID NO: 201, a CDR-L1 of SEQ ID NO: 202, a CDR-L2 of SEQ ID NO: 192, and a CDR-L3 of SEQ ID NO: 203.

[0931] 8. The method of any one of embodiments 1-7, wherein the antibody is selected from:
[0932] (i) an antibody comprising a VH comprising an amino acid sequence at least 85% identical to SEQ ID NO: 7, and/or a VL comprising an amino acid sequence at least 85% identical to SEQ ID NO: 8;
[0933] (ii) an antibody comprising a VH comprising an amino acid sequence at least 85% identical to SEQ ID NO: 15, and/or a VL comprising an amino acid sequence at least 85% identical to SEQ ID NO: 16; (iii) an antibody comprising a VH comprising an amino acid sequence at least 85% identical to SEQ ID NO: 23, and/or a VL comprising an amino acid sequence at least 85% identical to SEQ ID NO: 24; and
[0934] (iv) an antibody comprising a VH comprising an amino acid sequence at least 85% identical to SEQ ID NO: 204, and/or a VL comprising an amino acid sequence at least 85% identical to SEQ ID NO: 205.

[0935] 9. The method of any one of embodiments 1-8, wherein the subject has a muscle disease.

[0936] 10. The method of any one of embodiments 1-9, wherein the molecular payload is configured to modulate expression or activity of a disease allele, wherein the disease allele is associated with a muscle disease.

[0937] 11. The method of embodiment 10, wherein the subject was diagnosed as having the muscle disease based on a genetic analysis of the disease allele.

[0938] 12. The method of embodiment 11, wherein the disease allele encodes a gain of function mutation that is associated with the muscle disease.

[0939] 13. The method of embodiment 11, wherein the subject encodes a loss of function mutation that is associated with the muscle disease.

[0940] 14. The method of any one of embodiments 1-13, wherein the equilibrium dissociation constant (K_{D}) of binding of the antibody to the transferrin receptor is in a range from 10⁻¹¹ M to 10⁻⁶ M.

[0941] 15. The method of any one of embodiments 1 to 14, wherein the antibody does not specifically bind to the transferrin binding site of the transferrin receptor and/or wherein the antibody does not inhibit binding of transferrin to the transferrin receptor.

[0942] 16. The method of any one of embodiments 1 to 15, wherein the antibody is cross-reactive with extracellular epitopes of two or more of a human, non-human primate and rodent transferrin receptor.

[0943] 17. The method of any one of embodiments 1 to 16, wherein the method is configured to promote transferrin receptor mediated internalization of the molecular payload into a muscle cell.

[0944] 18. The method of any of embodiments 1 to 17, wherein the antibody is a chimeric antibody, optionally wherein the chimeric antibody is a humanized monoclonal antibody.

[0945] 19. The method of any one of embodiments 1 to 18, wherein the antibody is in the form of a ScFv, a Fab fragment, F(ab′) fragment, F(ab′)₂ fragment, or Fv fragment.

[0946] 20. The method of any one of embodiments 1 to 19, wherein the molecular payload is an oligonucleotide.

[0947] 21. The method of embodiment 20, wherein the oligonucleotide comprises a region of complementarity to a gene listed in Table 1 of an mRNA encoded therefrom, optionally wherein the oligonucleotide comprises a sequence as set forth in any of SEQ ID NOs: 259-261, 309-12147, and 12172- 28939.

[0948] 22. The method of embodiment 20 or 21, wherein the oligonucleotide is a gapmer oligonucleotide, a mixmer oligonucleotide, an antisense oligonucleotide, a RNAi oligonucleotide, a messenger RNA (mRNA), or a guide sequence.

[0949] 23. The method of any one of embodiments 1 to 22, wherein the complex is administered to the subject by extramuscular parenteral administration.

[0950] 24. The method of embodiment 23, wherein the complex is administered to the subject by intravenous administration.

[0951] 25. The method of embodiment 23, wherein the complex is administered to the subject by subcutaneous administration of the complex.

[0952] 26. A complex comprising a muscle-targeting agent linked to a molecular payload (e.g., configured for inhibiting expression or activity of a muscle disease gene)wherein the muscle targeting agent is an antibody that binds to a transferrin receptor and comprises a heavy chain variable region (VH) comprising a CDR-H1, a CDR-H2, and a CDR-H3 of any one of the antibodies listed in Table 2, Table 4, or Table 7, and/or comprises a light chain variable region (VL) comprising a CDR-L1, a CDR-L2, and a CDR-L3 of any one of the antibodies listed in Table 2, Table 4, or Table 7, optionally wherein the molecular payload comprises a single-stranded oligonucleotide, wherein the oligonucleotide comprises a region of complementarity to a muscle disease gene,.

[0953] 27. A complex comprising a muscle-targeting agent covalently linked to an oligonucleotide comprising:
[0954] i. a strand that comprises a sequence as set forth in any one of SEQ ID NOs: 259-261, 309-12147, and 12172- 28939; or
[0955] ii. a strand having a region of complementarity of at least 8 nucleotides in length to a sequence as set forth in SEQ ID NO: 6240-12147, 12172-19511, and 26852-27896,
[0956] wherein the oligonucleotide is configured to modulate expression or activity of a target gene corresponding to the sequence.

[0957] 28. The complex of embodiment 26 or 27, wherein the muscle targeting agent is an antibody that binds to a transferrin receptor, optionally wherein the antibody comprises a heavy chain variable region (VH) comprising a CDR-H1, a CDR-H2, and a CDR-H3 of any one of the antibodies listed in Table 2, Table 4, or Table 7, and/or a light chain variable region (VL) comprising a CDR-L1, a CDR-L2, and a CDR-L3 of any one of the antibodies listed in Table 2, Table 4, or Table 7.

[0958] 29. The complex of embodiment 28, wherein the antibody comprises a VH that is at least 85% identical to the VH of any one of the antibodies listed in Table 2 or Table 7, and/or a VL that is at least 85% identical to the VL of any one of the antibodies listed in Table 2 or Table 7.

[0959] 30. The complex of embodiment 28, wherein the antibody is selected from:
[0960] (i) an antibody comprising a CDR-H1, a CDR-H2, and a CDR-H3 of a VH comprising the amino acid sequence of SEQ ID NO: 7, and/or a CDR-L1, a CDR-L2, and a CDR-L3 of a VL comprising the amino acid sequence of SEQ ID NO: 8;
[0961] (ii) an antibody comprising a CDR-H1, a CDR-H2, and a CDR-H3 of a VH comprising the amino acid sequence of SEQ ID NO: 15, and/or a CDR-L1, a CDR-L2, and a CDR-L3 of a VL comprising the amino acid sequence of SEQ ID NO: 16;
[0962] (iii) an antibody comprising a CDR-H1, a CDR-H2, and a CDR-H3 of a VH comprising the amino acid sequence of SEQ ID NO: 23, and/or a CDR-L1, a CDR-L2, and a CDR-L3 of a VL comprising the amino acid sequence of SEQ ID NO: 24; and
[0963] (iv) an antibody comprising a CDR-H1, a CDR-H2, and a CDR-H3 of a VH comprising the amino acid sequence of SEQ ID NO: 204, and/or a CDR-L1, a CDR-L2, and a CDR-L3 of a VL comprising the amino acid sequence of SEQ ID NO: 205.

[0964] 31. The complex of embodiment 28, wherein the antibody comprises:
[0965] (i) a CDR-H1 of SEQ ID NO: 1, a CDR-H2 of SEQ ID NO: 2, SEQ ID NO: 262, or SEQ ID NO: 80, a CDR-H3 of SEQ ID NO: 3, a CDR-L1 of SEQ ID NO: 4, a CDR-L2 of SEQ ID NO: 5, and a CDR-L3 of SEQ ID NO: 6;
[0966] (ii) a CDR-H1 of SEQ ID NO: 145, a CDR-H2 of SEQ ID NO: 146, SEQ ID NO: 263, or SEQ ID NO: 265, a CDR-H3 of SEQ ID NO: 147, a CDR-L1 of SEQ ID NO: 148, a CDR-L2 of SEQ ID NO: 149, and a CDR-L3 of SEQ ID NO: 6; or
[0967] (iii) a CDR-H1 of SEQ ID NO: 150, a CDR-H2 of SEQ ID NO: 151, SEQ ID NO: 270, or SEQ ID NO: 271, a CDR-H3 of SEQ ID NO: 152, a CDR-L1 of SEQ ID NO: 153, a CDR-L2 of SEQ ID NO: 5, and a CDR-L3 of SEQ ID NO: 154.

[0968] 32. The complex of embodiment 28, wherein the antibody comprises:
[0969] (i) a CDR-H1 of SEQ ID NO: 9, a CDR-H2 of SEQ ID NO: 10, a CDR-H3 of SEQ ID NO: 11, a CDR-L1 of SEQ ID NO: 12, a CDR-L2 of SEQ ID NO: 13, and a CDR-L3 of SEQ ID NO: 14;
[0970] (ii) a CDR-H1 of SEQ ID NO: 155, a CDR-H2 of SEQ ID NO: 156, a CDR-H3 of SEQ ID NO: 157, a CDR-L1 of SEQ ID NO: 158, a CDR-L2 of SEQ ID NO: 159, and a CDR-L3 of SEQ ID NO: 14; or
[0971] (iii) a CDR-H1 of SEQ ID NO: 160, a CDR-H2 of SEQ ID NO: 161, a CDR-H3 of SEQ ID NO: 162, a CDR-L1 of SEQ ID NO: 163, a CDR-L2 of SEQ ID NO: 13, and a CDR-L3 of SEQ ID NO: 164.

[0972] 33. The complex of embodiment 28, wherein the antibody comprises:
[0973] (i) a CDR-H1 of SEQ ID NO: 17, SEQ ID NO: 266, or SEQ ID NO: 268, a CDR-H2 of SEQ ID NO: 18, a CDR-H3 of SEQ ID NO: 19, a CDR-L1 of SEQ ID NO: 20, a CDR-L2 of SEQ ID NO: 21, and a CDR-L3 of SEQ ID NO: 22;
[0974] (ii) a CDR-H1 of SEQ ID NO: 165, SEQ ID NO: 267, or SEQ ID NO: 269, a CDR-H2 of SEQ ID NO: 166, a CDR-H3 of SEQ ID NO: 167, a CDR-L1 of SEQ ID NO: 168, a CDR-L2 of SEQ ID NO: 169, and a CDR-L3 of SEQ ID NO: 22; or
[0975] (iii) a CDR-H1 of SEQ ID NO: 170, a CDR-H2 of SEQ ID NO: 171, a CDR-H3 of SEQ ID NO: 172, a CDR-L1 of SEQ ID NO: 173, a CDR-L2 of SEQ ID NO: 21, and a CDR-L3 of SEQ ID NO: 174.

[0976] 34. The complex of embodiment 28, wherein the antibody comprises:
[0977] (i) a CDR-H1 of SEQ ID NO: 188, a CDR-H2 of SEQ ID NO: 189, a CDR-H3 of SEQ ID NO: 190, a CDR-L1 of SEQ ID NO: 191, a CDR-L2 of SEQ ID NO: 192, and a CDR-L3 of SEQ ID NO: 193;
[0978] (ii) a CDR-H1 of SEQ ID NO: 194, a CDR-H2 of SEQ ID NO: 195, a CDR-H3 of SEQ ID NO: 196, a CDR-L1 of SEQ ID NO: 197, a CDR-L2 of SEQ ID NO: 198, and a CDR-L3 of SEQ ID NO: 193; or
[0979] (iii) a CDR-H1 of SEQ ID NO: 199, a CDR-H2 of SEQ ID NO: 200, a CDR-H3 of SEQ ID NO: 201, a CDR-L1 of SEQ ID NO: 202, a CDR-L2 of SEQ ID NO: 192, and a CDR-L3 of SEQ ID NO: 203.

[0980] 35. The complex of any one of embodiments 28-32, wherein the antibody is selected from:
[0981] (i) an antibody comprising a VH comprising an amino acid sequence at least 85% identical to SEQ ID NO: 7, and/or a VL comprising an amino acid sequence at least 85% identical to SEQ ID NO: 8;
[0982] (ii) an antibody comprising a VH comprising an amino acid sequence at least 85% identical to SEQ ID NO: 15, and/or a VL comprising an amino acid sequence at least 85% identical to SEQ ID NO: 16;
[0983] (iii) an antibody comprising a VH comprising an amino acid sequence at least 85% identical to SEQ ID NO: 23, and/or a VL comprising an amino acid sequence at least 85% identical to SEQ ID NO: 24;
[0984] (iv) an antibody comprising a VH comprising an amino acid sequence at least 85% identical to SEQ ID NO: 204, and/or a VL comprising an amino acid sequence at least 85% identical to SEQ ID NO: 205.

[0985] 36. The complex of any one of embodiments 26-35, wherein the equilibrium dissociation constant (K_{D}) of binding of the muscle-targeting antibody to the transferrin receptor is in a range from 10⁻¹¹ M to 10⁻⁶ M.

[0986] 37. The complex of any one of embodiments 26 to 36, wherein the antibody does not specifically bind to the transferrin binding site of the transferrin receptor and/or wherein the antibody does not inhibit binding of transferrin to the transferrin receptor.

[0987] 38. The complex of any one of embodiments 26 to 37, wherein the antibody is cross-reactive with extracellular epitopes of two or more of a human, non-human primate and rodent transferrin receptor.

[0988] 39. The complex of any one of embodiments 26 to 38, wherein the complex is configured to promote transferrin receptor mediated internalization of the molecular payload into a muscle cell.

[0989] 40. The complex of any one of embodiments 26 to 39, wherein the antibody is a chimeric antibody.

[0990] 41. The complex of embodiment 40, wherein the chimeric antibody is a humanized monoclonal antibody.

[0991] 42. The complex of any one of embodiments 26 to 41, wherein the antibody is in the form of a ScFv, a Fab fragment, Fab′ fragment, F(ab′)₂ fragment, or Fv fragment.

[0992] 43. The complex of any one of embodiments 26 to 42, wherein the molecular payload is an oligonucleotide.

[0993] 44. The complex of embodiment 43, wherein the oligonucleotide comprises a region of complementarity to a muscle disease gene having a gain-of-function disease allele.

[0994] 45. The complex of any one of embodiments 26 to 42, wherein the molecular payload is a polypeptide.

[0995] 46. The complex of embodiment 45, wherein the polypeptide is an E3 ubiquitin ligase inhibitor peptide.

[0996] 47. The complex of embodiment 43 or 44, wherein the oligonucleotide comprises at least one modified internucleotide linkage.

[0997] 48. The complex of embodiment 47, wherein the at least one modified internucleotide linkage is a phosphorothioate linkage.

[0998] 49. The complex of embodiment 48, wherein the oligonucleotide comprises phosphorothioate linkages in the Rp stereochemical conformation and/or in the Sp stereochemical conformation.

[0999] 50. The complex of embodiment 49, wherein the oligonucleotide comprises phosphorothioate linkages that are all in the Rp stereochemical conformation or that are all in the Sp stereochemical conformation.

[1000] 51. The complex of any one of embodiments 43, 44, or 47 to 50, wherein the oligonucleotide comprises one or more modified nucleotides.

[1001] 52. The complex of embodiment 51, wherein the one or more modified nucleotides are 2′-modified nucleotides.

[1002] 53. The complex of any one of embodiments 43, 44, or 47 to 52, wherein the oligonucleotide is a gapmer oligonucleotide that directs RNAse H-mediated cleavage of an mRNA transcript encoded by the muscle disease gene in a cell.

[1003] 54. The complex of embodiment 53, wherein the gapmer oligonucleotide comprises a central portion of 5 to 15 deoxyribonucleotides flanked by wings of 2 to 8 modified nucleotides.

[1004] 55. The complex of embodiment 54, wherein the modified nucleotides of the wings are 2′-modified nucleotides.

[1005] 56. The complex of any one of embodiments 43, 44, or 47 to 52, wherein the oligonucleotide is a mixmer oligonucleotide.

[1006] 57. The complex of embodiment 56, wherein the mixmer oligonucleotide comprises two or more different 2′ modified nucleotides.

[1007] 58. The complex of any one of embodiments 43, 44, or 47 to 52, wherein the oligonucleotide is an RNAi oligonucleotide that promotes RNAi-mediated cleavage of a mRNA transcript encoded by the muscle disease gene.

[1008] 59. The complex of embodiment 58, wherein the RNAi oligonucleotide is a doublestranded oligonucleotide of 19 to 25 nucleotides in length.

[1009] 60. The complex of embodiment 58 or 59, wherein the RNAi oligonucleotide comprises at least one 2′ modified nucleotide.

[1010] 61. The complex of any one of embodiments 52, 55, 57, or 60, wherein each 2′ modified nucleotide is selected from the group consisting of: 2′-O-methyl, 2′-fluoro (2′-F), 2′-O-methoxyethyl (2′-MOE), and 2′, 4′-bridged nucleotides.

[1011] 62. The complex of embodiment 51, wherein the one or more modified nucleotides are bridged nucleotides.

[1012] 63. The complex of any one of embodiments 52, 55, 57, or 60, wherein at least one 2′ modified nucleotide is a 2′,4′-bridged nucleotide selected from: 2′,4′-constrained 2′-O-ethyl (cEt) and locked nucleic acid (LNA) nucleotides.

[1013] 64. The complex of any one of embodiments 43, 44, or 47 to 52, wherein the oligonucleotide comprises a guide sequence for a genome editing nuclease.

[1014] 65. The complex of any one of embodiments 43, 44, or 47 to 52, wherein the oligonucleotide is phosphorodiamidite morpholino oligomer.

[1015] 66. The complex of any one of embodiments 28 to 65, wherein the antibody is covalently linked to the molecular payload via a cleavable linker.

[1016] 67. The complex of embodiment 66, wherein the cleavable linker is selected from: a protease-sensitive linker, pH-sensitive linker, and glutathione-sensitive linker.

[1017] 68. The complex of embodiment 67, wherein the cleavable linker is a protease-sensitive linker.

[1018] 69. The complex of embodiment 68, wherein the protease-sensitive linker comprises a sequence cleavable by a lysosomal protease and/or an endosomal protease.

[1019] 70. The complex of embodiment 68, wherein the protease-sensitive linker comprises a valine-citrulline dipeptide sequence.

[1020] 71. The complex of embodiment 67, wherein the linker is a pH-sensitive linker that is cleaved at a pH in a range of 4 to 6.

[1021] 72. The complex of any one of embodiments 28 to 65, wherein the antibody is covalently linked to the molecular payload via a non-cleavable linker.

[1022] 73. The complex of embodiment 72, wherein the non-cleavable linker is an alkane linker.

[1023] 74. The complex of any one of embodiments 28 to 73, wherein the antibody comprises a non-natural amino acid to which the oligonucleotide is covalently linked.

[1024] 75. The complex of any one of embodiments 28 to 74, wherein the antibody is covalently linked to the oligonucleotide via conjugation to a lysine residue or a cysteine residue of the antibody.

[1025] 76. The complex of embodiment 75, wherein the antibody is conjugated to the cysteine via a maleimide-containing linker, optionally wherein the maleimide-containing linker comprises a maleimidocaproyl or maleimidomethyl cyclohexane-1-carboxylate group.

[1026] 77. The complex of any one of embodiments 28 to 76, wherein the antibody is a glycosylated antibody that comprises at least one sugar moiety to which the oligonucleotide is covalently linked.

[1027] 78. The complex of embodiment 77, wherein the sugar moiety is a branched mannose.

[1028] 79. The complex of embodiment 77 or 78, wherein the antibody is a glycosylated antibody that comprises one to four sugar moieties each of which is covalently linked to a separate oligonucleotide.

[1029] 80. The complex of embodiment 77, wherein the antibody is a fully-glycosylated antibody.

[1030] 81. The complex of embodiment 77, wherein the antibody is a partially-glycosylated antibody.

[1031] 82. The complex of embodiment 81, wherein the partially-glycosylated antibody is produced via chemical or enzymatic means.

[1032] 83. The complex of embodiment 81, wherein the partially-glycosylated antibody is produced in a cell, cell that is deficient for an enzyme in the N- or O- glycosylation pathway.

[1033] 84. A method of delivering a molecular payload to a cell expressing transferrin receptor, the method comprising contacting the cell with the complex of any one of embodiments 29 to 83.

[1034] 85. A method of inhibiting expression or activity of muscle disease gene in a cell, the method comprising contacting the cell with the complex of any one of embodiments 29 to 83 in an amount effective for promoting internalization of the molecular payload to the cell.

[1035] 86. The method of embodiment 85, wherein the cell is in vitro.

[1036] 87. The method of embodiment 85, wherein the cell is in a subject.

[1037] 88. The method of embodiment 87, wherein the subject is a human.

[1038] 89. A method of treating a subject having a muscle disease, the method comprising administering to the subject an effective amount of the complex of any one of embodiments 29 to 83.

[1039] 90. The method of embodiment 89, wherein the muscle disease is a disease listed in Table 1.

[1040] 91. The method of embodiment 89, wherein the muscle disease is a disease selected from the group consisting of: Adult Pompe Disease, Centronuclear myopathy (CNM), Duchenne Muscular Dystrophy, Facioscapulohumeral Muscular Dystrophy (FSHD), Familial Hypertrophic Cardiomyopathy, Fibrodysplasia Ossificans Progressiva (FOP), Friedreich’s Ataxia (FRDA), Inclusion Body Myopathy 2, Laing Distal Myopathy, Myofibrillar Myopathy, Myotonia Congenita (autosomal dominant form, Thomsen Disease), Myotonic Dystrophy Type I, Myotonic Dystrophy Type II, Myotubular Myopathy, Oculopharyngeal Muscular Dystrophy, and Paramyotonia Congenita.

### EQUIVALENTS AND TERMINOLOGY

[1041] The disclosure illustratively described herein suitably can be practiced in the absence of any element or elements, limitation or limitations that are not specifically disclosed herein. Thus, for example, in each instance herein any of the terms “comprising”, “consisting essentially of”, and “consisting of” may be replaced with either of the other two terms. The terms and expressions which have been employed are used as terms of description and not of limitation, and there is no intention that in the use of such terms and expressions of excluding any equivalents of the features shown and described or portions thereof, but it is recognized that various modifications are possible within the scope of the disclosure. Thus, it should be understood that although the present disclosure has been specifically disclosed by preferred embodiments, optional features, modification and variation of the concepts herein disclosed may be resorted to by those skilled in the art, and that such modifications and variations are considered to be within the scope of this disclosure.

[1042] In addition, where features or aspects of the disclosure are described in terms of Markush groups or other grouping of alternatives, those skilled in the art will recognize that the disclosure is also thereby described in terms of any individual member or subgroup of members of the Markush group or other group.

[1043] It should be appreciated that, in some embodiments, sequences presented in the sequence listing may be referred to in describing the structure of an oligonucleotide or other nucleic acid. In such embodiments, the actual oligonucleotide or other nucleic acid may have one or more alternative nucleotides (e.g., an RNA counterpart of a DNA nucleotide or a DNA counterpart of an RNA nucleotide) and/or (e.g., and) one or more modified nucleotides and/or (e.g., and) one or more modified internucleotide linkages and/or (e.g., and) one or more other modification compared with the specified sequence while retaining essentially same or similar complementary properties as the specified sequence.

[1044] The use of the terms “a” and “an” and “the” and similar referents in the context of describing the invention (especially in the context of the following claims) are to be construed to cover both the singular and the plural, unless otherwise indicated herein or clearly contradicted by context. The terms “comprising,” “having,” “including,” and “containing” are to be construed as open-ended terms (i.e., meaning “including, but not limited to,”) unless otherwise noted. Recitation of ranges of values herein are merely intended to serve as a shorthand method of referring individually to each separate value falling within the range, unless otherwise indicated herein, and each separate value is incorporated into the specification as if it were individually recited herein. All methods described herein can be performed in any suitable order unless otherwise indicated herein or otherwise clearly contradicted by context. The use of any and all examples, or exemplary language (e.g., “such as”) provided herein, is intended merely to better illuminate the invention and does not pose a limitation on the scope of the invention unless otherwise claimed. No language in the specification should be construed as indicating any non-claimed element as essential to the practice of the invention.

[1045] Embodiments of this invention are described herein. Variations of those embodiments may become apparent to those of ordinary skill in the art upon reading the foregoing description.

[1046] The inventors expect skilled artisans to employ such variations as appropriate, and the inventors intend for the invention to be practiced otherwise than as specifically described herein. Accordingly, this invention includes all modifications and equivalents of the subject matter recited in the claims appended hereto as permitted by applicable law. Moreover, any combination of the above-described elements in all possible variations thereof is encompassed by the invention unless otherwise indicated herein or otherwise clearly contradicted by context. Those skilled in the art will recognize or be able to ascertain using no more than routine experimentation, many equivalents to the specific embodiments of the invention described herein. Such equivalents are intended to be encompassed by the following claims.

1. A complex comprising an anti-transferrin receptor antibody covalently linked to a molecular payload configured for modulating expression or activity of a muscle disease gene, wherein the antibody comprises a heavy chain complementarity determining region 1 (CDR-H1), a heavy chain complementarity determining region 2 (CDR-H2), a heavy chain complementarity determining region 3 (CDR-H3) of a heavy chain variable region (VH) comprising the amino acid sequence of SEQ ID NO: 54, and a light chain complementarity determining region 1 (CDR-L1), a light chain complementarity determining region 2 (CDR-L2), a light chain complementarity determining region 3 (CDR-L3) of a light chain variable region (VL) comprising the amino acid sequence of SEQ ID NO: 55.

2. The complex of claim 1, wherein the antibody comprises a CDR-H1 of SEQ ID NO: 49, a CDR-H2 of SEQ ID NO: 50, a CDR-H3 of SEQ ID NO: 51, a CDR-L1 of SEQ ID NO: 52, a CDR-L2 of SEQ ID NO: 29, and a CDR-L3 of SEQ ID NO: 53.

3. The complex of claim 1, wherein the antibody comprises human or humanized framework regions with the CDR-H1, the CDR-H2, the CDR-H3 of a VH as set forth in SEQ ID NO: 54, and the CDR-L1, the CDR-L2, the CDR-L3 of a VL as set forth in SEQ ID NO: 55.

4. The complex of claim 1, wherein the antibody comprises a VH comprising an amino acid sequence at least 80% identical to SEQ ID NO: 54, and a VL comprising an amino acid sequence at least 80% identical to SEQ ID NO: 55.

5. The complex of claim 1, wherein the equilibrium dissociation constant (K_{D}) of binding of the antibody to the transferrin receptor is in a range from 10⁻¹¹ M to 10⁻⁶ M.

6. The complex of claim 1, wherein the antibody is selected from the group consisting of a full-length IgG, a Fab fragment, a F(ab′) fragment, a F(ab′)2 fragment, a scFv, and a Fv.

7. The complex of claim 1, wherein the molecular payload is an oligonucleotide.

8. The complex of claim 7, wherein the oligonucleotide comprises at least one modified internucleoside linkage.

9. The complex of claim 8, wherein the at least one modified internucleoside linkage is a phosphorothioate linkage.

10. The complex of claim 7, wherein the oligonucleotide comprises one or more modified nucleotides.

11. The complex of claim 10, wherein the one or more modified nucleotides are 2′-modified nucleotides.

12. The complex of claim 11, wherein the 2′ modified nucleotide is selected from the group consisting of: 2′-O-methyl (2′-O-Me), 2′-fluoro (2′-F), 2′-O-methoxyethyl (2′-MOE), and 2′,4′bicyclic nucleosides .

13. The complex of claim 7, wherein the oligonucleotide is a gapmer oligonucleotide that directs RNAse H-mediated cleavage of an mRNA transcript encoded by the muscle disease gene in a cell.

14. The complex of claim 7, wherein the oligonucleotide is a mixmer oligonucleotide.

15. The complex of claim 7, wherein the oligonucleotide is an RNAi oligonucleotide that promotes RNAi-mediated cleavage of a mRNA transcript encoded by the muscle disease gene.

16. The complex of claim 7, wherein the oligonucleotide is phosphorodiamidate morpholino oligomer.

17. The complex of claim 1, wherein the antibody is covalently linked to the molecular payload via a cleavable linker .

18. A method of delivering a molecular payload to a cell expressing transferrin receptor, the method comprising contacting the cell with the complex of claim 1.

19. A method of inhibiting expression or activity of muscle disease gene in a cell, the method comprising contacting the cell with the complex of claim 1 in an amount effective for promoting internalization of the molecular payload to the cell.

20. A method of treating a subject having a muscle disease, the method comprising administering to the subject an effective amount of the complex of claim 1 .

The application's sequence listing, which the Patent Office published only in electronic form, follows.

SEQUENCE LISTING (28939 sequences)

SEQ ID NO: 1 - protein, 8 aa, Artificial Sequence
  Synthetic
GFNIKDDY

SEQ ID NO: 2 - protein, 8 aa, Artificial Sequence
  Synthetic
IDPENGDT

SEQ ID NO: 3 - protein, 10 aa, Artificial Sequence
  Synthetic
TLWLRRGLDY

SEQ ID NO: 4 - protein, 11 aa, Artificial Sequence
  Synthetic
KSLLHSNGYTY

SEQ ID NO: 5 - protein, 3 aa, Artificial Sequence
  Synthetic
RMS

SEQ ID NO: 6 - protein, 9 aa, Artificial Sequence
  Synthetic
MQHLEYPFT

SEQ ID NO: 7 - protein, 117 aa, Artificial Sequence
  Synthetic
EVQLQQSGAELVRPGASVKLSCTASGFNIKDDYMYWVKQRPEQGLEWIGWIDPENGDTEYASKFQDKATVTADTSSNTAYLQLSSLTSEDTAVYYCTLWLRRGLDYWGQGTSVTVSS

SEQ ID NO: 8 - protein, 112 aa, Artificial Sequence
  Synthetic
DIVMTQAAPSVPVTPGESVSISCRSSKSLLHSNGYTYLFWFLQRPGQSPQLLIYRMSNLASGVPDRFSGSGSGTAFTLRISRVEAEDVGVYYCMQHLEYPFTFGGGTKLEIK

SEQ ID NO: 9 - protein, 9 aa, Artificial Sequence
  Synthetic
GYSITSGYY

SEQ ID NO: 10 - protein, 7 aa, Artificial Sequence
  Synthetic
ITFDGAN

SEQ ID NO: 11 - protein, 12 aa, Artificial Sequence
  Synthetic
TRSSYDYDVLDY

SEQ ID NO: 12 - protein, 6 aa, Artificial Sequence
  Synthetic
QDISNF

SEQ ID NO: 13 - protein, 3 aa, Artificial Sequence
  Synthetic
YTS

SEQ ID NO: 14 - protein, 9 aa, Artificial Sequence
  Synthetic
QQGHTLPYT

SEQ ID NO: 15 - protein, 119 aa, Artificial Sequence
  Synthetic
DVQLQESGPGLVKPSQSLSLTCSVTGYSITSGYYWNWIRQFPGNKLEWMGYITFDGANNYNPSLKNRISITRDTSKNQFFLKLTSVTTEDTATYYCTRSSYDYDVLDYWGQGTTLTVSS

SEQ ID NO: 16 - protein, 107 aa, Artificial Sequence
  Synthetic
DIQMTQTTSSLSASLGDRVTISCRASQDISNFLNWYQQRPDGTVKLLIYYTSRLHSGVPSRFSGSGSGTDFSLTVSNLEQEDIATYFCQQGHTLPYTFGGGTKLEIK

SEQ ID NO: 17 - protein, 8 aa, Artificial Sequence
  Synthetic
GYSFTDYC

SEQ ID NO: 18 - protein, 8 aa, Artificial Sequence
  Synthetic
IYPGSGNT

SEQ ID NO: 19 - protein, 13 aa, Artificial Sequence
  Synthetic
AREDYYPYHGMDY

SEQ ID NO: 20 - protein, 10 aa, Artificial Sequence
  Synthetic
ESVDGYDNSF

SEQ ID NO: 21 - protein, 3 aa, Artificial Sequence
  Synthetic
RAS

SEQ ID NO: 22 - protein, 9 aa, Artificial Sequence
  Synthetic
QQSSEDPWT

SEQ ID NO: 23 - protein, 120 aa, Artificial Sequence
  Synthetic
QIQLQQSGPELVRPGASVKISCKASGYSFTDYCINWVNQRPGQGLEWIGWIYPGSGNTRYSERFKGKATLTVDTSSNTAYMQLSSLTSEDSAVYFCAREDYYPYHGMDYWGQGTSVTVSS

SEQ ID NO: 24 - protein, 111 aa, Artificial Sequence
  Synthetic
DIVLTQSPTSLAVSLGQRATISCRASESVDGYDNSFMHWYQQKPGQPPKLLIFRASNLESGIPARFSGSGSRTDFTLTINPVEAADVATYYCQQSSEDPWTFGGGTKLEIK

SEQ ID NO: 25 - protein, 8 aa, Artificial Sequence
  Synthetic
GYTFTSYW

SEQ ID NO: 26 - protein, 8 aa, Artificial Sequence
  Synthetic
IFPNSGRT

SEQ ID NO: 27 - protein, 11 aa, Artificial Sequence
  Synthetic
AREGNFGSLDY

SEQ ID NO: 28 - protein, 5 aa, Artificial Sequence
  Synthetic
SNLNY

SEQ ID NO: 29 - protein, 3 aa, Artificial Sequence
  Synthetic
DTS

SEQ ID NO: 30 - protein, 9 aa, Artificial Sequence
  Synthetic
QQWSRNPLT

SEQ ID NO: 31 - protein, 118 aa, Artificial Sequence
  Synthetic
QVHLQQPGAELVKPGASVKMSCKASGYTFTSYWITWVKQRPGQGLEWIGDIFPNSGRTNYDEKFKSKATLTVDTSSSTAYMQLSSLTSEDSAVYFCAREGNFGSLDYWGQGTTLTVSS

SEQ ID NO: 32 - protein, 106 aa, Artificial Sequence
  Synthetic
QIVLTQSPAIMSASPGEKVTMTCSANSNLNYMNWYHQKSGTSPKRWIYDTSKLASGVPARFSASGSGTSYSLTISSMEAEDAATYYCQQWSRNPLTFGAGTRLELK

SEQ ID NO: 33 - protein, 10 aa, Artificial Sequence
  Synthetic
GFSLNTYDVG

SEQ ID NO: 34 - protein, 7 aa, Artificial Sequence
  Synthetic
IWWNDDK

SEQ ID NO: 35 - protein, 11 aa, Artificial Sequence
  Synthetic
TLYSYDGGFAY

SEQ ID NO: 36 - protein, 7 aa, Artificial Sequence
  Synthetic
SSVSSSY

SEQ ID NO: 37 - protein, 3 aa, Artificial Sequence
  Synthetic
STS

SEQ ID NO: 38 - protein, 9 aa, Artificial Sequence
  Synthetic
HQYHRSPYT

SEQ ID NO: 39 - protein, 119 aa, Artificial Sequence
  Synthetic
QVTLKESGPGMLQPSQTLSLTCSFSGFSLNTYDVGVGWIRQPSGKGLEWLANIWWNDDKYYNSALKSRLTISKDTSNNQVFLKISSVDTADTATYYCTLYSYDGGFAYWGQGTLVTVSA

SEQ ID NO: 40 - protein, 108 aa, Artificial Sequence
  Synthetic
QIVLTQSPAIMSASLGERVTMTCTASSSVSSSYLHWYQQKPGSSPKLWIYSTSNLASGVPARFSGSGSGTSYSLTISSMEAEDAATYYCHQYHRSPYTFGGGTKLEIK

SEQ ID NO: 41 - protein, 8 aa, Artificial Sequence
  Synthetic
GYSFTGYN

SEQ ID NO: 42 - protein, 8 aa, Artificial Sequence
  Synthetic
INPYYGST

SEQ ID NO: 43 - protein, 15 aa, Artificial Sequence
  Synthetic
ARGDYGYDEGTWFAY

SEQ ID NO: 44 - protein, 12 aa, Artificial Sequence
  Synthetic
QSLLNSRTRKNY

SEQ ID NO: 45 - protein, 3 aa, Artificial Sequence
  Synthetic
WAS

SEQ ID NO: 46 - protein, 9 aa, Artificial Sequence
  Synthetic
KQSYNLPFT

SEQ ID NO: 47 - protein, 122 aa, Artificial Sequence
  Synthetic
EIQMKQSGAELVKPGASVKISCKASGYSFTGYNMNWVKQSHGKSLEWIGNINPYYGSTGYNQKFKGKATLTVDKSSSTAYMQLNSLTSEDSAVYYCARGDYGYDEGTWFAYWGQGTLVTVSA

SEQ ID NO: 48 - protein, 113 aa, Artificial Sequence
  Synthetic
DIVMSQSPSSLAVSAGEKVTMSCKSSQSLLNSRTRKNYLAWYQQKPEQSPKLLIYWASTRESGVPDRFTGSGSGTDFTLTISSVQAEDLAVYYCKQSYNLPFTFGSGTKLEIK

SEQ ID NO: 49 - protein, 8 aa, Artificial Sequence
  Synthetic
GYTFTRHW

SEQ ID NO: 50 - protein, 8 aa, Artificial Sequence
  Synthetic
IYPGSGRT

SEQ ID NO: 51 - protein, 13 aa, Artificial Sequence
  Synthetic
ARDGYLYINYFDY

SEQ ID NO: 52 - protein, 5 aa, Artificial Sequence
  Synthetic
SSVSF

SEQ ID NO: 53 - protein, 9 aa, Artificial Sequence
  Synthetic
FQGSGYPYT

SEQ ID NO: 54 - protein, 120 aa, Artificial Sequence
  Synthetic
QVQLQQPGAELVKPGASVKMSCKASGYTFTRHWITWVKQRPGQGLEWIGDIYPGSGRTNYNEKFKSTATLTVDTSSSTAYMQLSSLTSEDSAVYYCARDGYLYINYFDYWGQGTTLTVSS

SEQ ID NO: 55 - protein, 106 aa, Artificial Sequence
  Synthetic
ENVLTQSPAIMSASPGEKVTMTCSASSSVSFMHWFQQKSSTSPKLWIYDTSKLASGVPGRFSGSGSGSSYSLTISSMAAEDVATYYCFQGSGYPYTFGGGTKLEIK

SEQ ID NO: 56 - protein, 8 aa, Artificial Sequence
  Synthetic
GFNIVDDY

SEQ ID NO: 57 - protein, 8 aa, Artificial Sequence
  Synthetic
IYPENADT

SEQ ID NO: 58 - protein, 11 aa, Artificial Sequence
  Synthetic
TTATGTGWFAY

SEQ ID NO: 59 - protein, 11 aa, Artificial Sequence
  Synthetic
QSLLDSDGKTY

SEQ ID NO: 60 - protein, 3 aa, Artificial Sequence
  Synthetic
LVS

SEQ ID NO: 61 - protein, 9 aa, Artificial Sequence
  Synthetic
WQGTHFPWT

SEQ ID NO: 62 - protein, 118 aa, Artificial Sequence
  Synthetic
EVQLQQSGAELVRPGASVKLSCTASGFNIVDDYMHWVKQRPEQGLEWIGWIYPENADTEYASKFQGKATITADTSSNTAYLQLSSLTSEDTAVYYCTTATGTGWFAYWGQGTLVTVSA

SEQ ID NO: 63 - protein, 112 aa, Artificial Sequence
  Synthetic
DVVMTQTPLTLSVTIGQPASISCKSSQSLLDSDGKTYLNWLFQRPGQSPKRLIYLVSKLDSGVPDRFTGSGSGTDFTLKISRVETEDLGVYYCWQGTHFPWTFGGGAKLEIK

SEQ ID NO: 64 - protein, 8 aa, Artificial Sequence
  Synthetic
GYTFSNYW

SEQ ID NO: 65 - protein, 8 aa, Artificial Sequence
  Synthetic
ILPGSGST

SEQ ID NO: 66 - protein, 11 aa, Artificial Sequence
  Synthetic
ARRGAYGNFHY

SEQ ID NO: 67 - protein, 7 aa, Artificial Sequence
  Synthetic
SSISSSN

SEQ ID NO: 68 - protein, 3 aa, Artificial Sequence
  Synthetic
GTS

SEQ ID NO: 69 - protein, 9 aa, Artificial Sequence
  Synthetic
QQWRSYPYT

SEQ ID NO: 70 - protein, 118 aa, Artificial Sequence
  Synthetic
QVQLQQSGAELMKPGASVKISCKATGYTFSNYWIEWVKQRPGHGLEWIGEILPGSGSTNYNENFKGKATFTADTSSNTAYMQLSSLTSEDSAVYYCARRGAYGNFHYWGQGTTLTVSS

SEQ ID NO: 71 - protein, 108 aa, Artificial Sequence
  Synthetic
EIVLTQSPALMAASPGEKVTITCSVSSSISSSNLHWYQQKSETSPKPWIYGTSNLASGVPVRFSGSGSGTSYSLTISSMEAEDAATYYCQQWRSYPYTFGGGTKLEIK

SEQ ID NO: 72 - protein, 8 aa, Artificial Sequence
  Synthetic
GYTFTDYN

SEQ ID NO: 73 - protein, 8 aa, Artificial Sequence
  Synthetic
INPNYDTT

SEQ ID NO: 74 - protein, 16 aa, Artificial Sequence
  Synthetic
ARSGYYGSSYYWHFDV

SEQ ID NO: 75 - protein, 12 aa, Artificial Sequence
  Synthetic
QSLLYSSNQKNY

SEQ ID NO: 76 - protein, 9 aa, Artificial Sequence
  Synthetic
QQYYNYPFT

SEQ ID NO: 77 - protein, 123 aa, Artificial Sequence
  Synthetic
EVQLQQFGAELVKPGASVKISCKASGYTFTDYNMAWVKESHGKSLEWIGDINPNYDTTSYNQKFKGKATLTVDKSSSTAHMELRSLTSEGTAVYYCARSGYYGSSYYWHFDVWGTGTTVTVSS

SEQ ID NO: 78 - protein, 113 aa, Artificial Sequence
  Synthetic
DIVMSQSPSSLAVSVGEKVTMSCKSSQSLLYSSNQKNYLAWYQQKPGQSPKLLIYWASTRESGVPDRFTGSGSGTDFTLTISSVKAEDLAVYYCQQYYNYPFTFGSGTKLEIK

SEQ ID NO: 79 - protein, 8 aa, Artificial Sequence
  Synthetic
GFNIKDYY

SEQ ID NO: 80 - protein, 8 aa, Artificial Sequence
  Synthetic
IDPESGDT

SEQ ID NO: 81 - protein, 9 aa, Artificial Sequence
  Synthetic
YGHDYRVDC

SEQ ID NO: 82 - protein, 11 aa, Artificial Sequence
  Synthetic
QSLVHSNGNTY

SEQ ID NO: 83 - protein, 3 aa, Artificial Sequence
  Synthetic
KVS

SEQ ID NO: 84 - protein, 9 aa, Artificial Sequence
  Synthetic
SQSTHIPWT

SEQ ID NO: 85 - protein, 116 aa, Artificial Sequence
  Synthetic
EVQLQQSGAELVRSGASVKLSCTASGFNIKDYYMHWVKQRPEQGLEWIGWIDPESGDTEYAPKFQGRATMTADTSSNTAYMQLSSLTSEDTAVYYCYGHDYRVDCWGQGTSVTVSS

SEQ ID NO: 86 - protein, 112 aa, Artificial Sequence
  Synthetic
DVVMTQTPLSLPVSLGDQASISCRSSQSLVHSNGNTYLHWYLQKPGQSPKLLIYKVSNRFSGVPDRFSGSGSGTDFTLKISRVEAEDLGVYFCSQSTHIPWTFGGGTKLEIK

SEQ ID NO: 87 - protein, 8 aa, Artificial Sequence
  Synthetic
INPNYDST

SEQ ID NO: 88 - protein, 9 aa, Artificial Sequence
  Synthetic
QQYYHYPFT

SEQ ID NO: 89 - protein, 123 aa, Artificial Sequence
  Synthetic
EVQLQQFGAELVKPGASVKISCKASGYTFTDYNMGWVKQSHGKSLEWIGDINPNYDSTSYTQKFKGKATLTVDKSSSTAYMELRSLTSEDTAVYYCARSGYYGSSYYWHFDVWGTGTTVTVSS

SEQ ID NO: 90 - protein, 113 aa, Artificial Sequence
  Synthetic
DIVMSQSPSSLAVSVGEKVTMSCKSSQSLLYSSNQKNYLAWYQQKPGQSPKLLIYWASTRESGVPDRFTGSGSGTDFTLTISSVKAEDLAVYYCQQYYHYPFTFGSGTKLEIK

SEQ ID NO: 91 - protein, 8 aa, Artificial Sequence
  Synthetic
GFSLTNYG

SEQ ID NO: 92 - protein, 7 aa, Artificial Sequence
  Synthetic
IWNDGSA

SEQ ID NO: 93 - protein, 11 aa, Artificial Sequence
  Synthetic
ARHESSNPFAY

SEQ ID NO: 94 - protein, 6 aa, Artificial Sequence
  Synthetic
QSIGTS

SEQ ID NO: 95 - protein, 3 aa, Artificial Sequence
  Synthetic
SAS

SEQ ID NO: 96 - protein, 9 aa, Artificial Sequence
  Synthetic
QQNNRWPYT

SEQ ID NO: 97 - protein, 117 aa, Artificial Sequence
  Synthetic
QVQLKESGPGLVAPSQSLSITCTVSGFSLTNYGVHWVRQPPGKGLEWLVVIWNDGSATYNSALESRLSISKDNSKSQVFLKMNSLQTDDTAMYYCARHESSNPFAYWGQGTLVTVSA

SEQ ID NO: 98 - protein, 107 aa, Artificial Sequence
  Synthetic
DILLTQSPAILSVSPGERVSFSCRASQSIGTSIHWYQQRTNGSPRLLIKSASESIAGIPSRFSGSGSGTDFTLSINSVESEDIADYYCQQNNRWPYTFGGGTKLEIK

SEQ ID NO: 99 - protein, 8 aa, Artificial Sequence
  Synthetic
DFNIKDDY

SEQ ID NO: 100 - protein, 8 aa, Artificial Sequence
  Synthetic
IDPANGNT

SEQ ID NO: 101 - protein, 6 aa, Artificial Sequence
  Synthetic
ALGYTY

SEQ ID NO: 102 - protein, 11 aa, Artificial Sequence
  Synthetic
QSLLHSYGKTY

SEQ ID NO: 103 - protein, 9 aa, Artificial Sequence
  Synthetic
LQTTHFPQT

SEQ ID NO: 104 - protein, 113 aa, Artificial Sequence
  Synthetic
EVQLQQSGAELVRPGASVKLSCTASDFNIKDDYIHWVKQRPEQGLEWIGRIDPANGNTKYAPKFQDKATITADTSSNTAYLQLSSLTSEDTAVYYCALGYTYWGQGTTLTVSS

SEQ ID NO: 105 - protein, 112 aa, Artificial Sequence
  Synthetic
DVVMTQTPLTLSVTIGQPASISCKSSQSLLHSYGKTYLNWLLQRPGQSPKLLIYLVSKLESGVPDRFSGSGSGTDFTLKISRVEAEDLGVYYCLQTTHFPQTFGGGTKLEIK

SEQ ID NO: 106 - protein, 8 aa, Artificial Sequence
  Synthetic
GFTFSDYG

SEQ ID NO: 107 - protein, 8 aa, Artificial Sequence
  Synthetic
INSGSSTI

SEQ ID NO: 108 - protein, 13 aa, Artificial Sequence
  Synthetic
ARPGDYDNYAMDY

SEQ ID NO: 109 - protein, 6 aa, Artificial Sequence
  Synthetic
QDVSVA

SEQ ID NO: 110 - protein, 3 aa, Artificial Sequence
  Synthetic
WAY

SEQ ID NO: 111 - protein, 10 aa, Artificial Sequence
  Synthetic
QQHYNTPPWT

SEQ ID NO: 112 - protein, 120 aa, Artificial Sequence
  Synthetic
EVQLVESGGDLVKPGGSLKLSCAASGFTFSDYGMHWVRQGPEKGLEWVAYINSGSSTIYYADTVKGRFTISRDNAKNTLFLQMTSLRSEDTAMYYCARPGDYDNYAMDYWGQGTSVTVSS

SEQ ID NO: 113 - protein, 108 aa, Artificial Sequence
  Synthetic
DIVMTQSHKFLSTSVGDRVSITCKASQDVSVAVAWYQQKPGQSPKLLIYWAYTRHTGVPDRFTGSGSGTEYTLTISSVQAEDLALYYCQQHYNTPPWTFGGGTKLEIK

SEQ ID NO: 114 - protein, 8 aa, Artificial Sequence
  Synthetic
IDPENADT

SEQ ID NO: 115 - protein, 9 aa, Artificial Sequence
  Synthetic
YAWDYSMDY

SEQ ID NO: 116 - protein, 9 aa, Artificial Sequence
  Synthetic
SQNTHVPYT

SEQ ID NO: 117 - protein, 116 aa, Artificial Sequence
  Synthetic
EVQLQQSGAELVRSGASVKLSCTASGFNIKDYYIHWVKQRPEQGLEWIGWIDPENADTEYAPKFQGKATMTPDTSSNTAYLQLSSLTSEDTAVYYCYAWDYSMDYWGQGTSVTVSS

SEQ ID NO: 118 - protein, 112 aa, Artificial Sequence
  Synthetic
DVVMTQTPLSLSVSLGDQASISCRSSQSLVHSNGNTYLHWYLQKPGQSPKLLIYKVSNRFSGVPDRFSGSGSGTDFILKISRVEAEDLGVYFCSQNTHVPYTFGGGTRLEIK

SEQ ID NO: 119 - protein, 8 aa, Artificial Sequence
  Synthetic
GFTFTDYG

SEQ ID NO: 120 - protein, 8 aa, Artificial Sequence
  Synthetic
IYPSSGNS

SEQ ID NO: 121 - protein, 12 aa, Artificial Sequence
  Synthetic
ARSTYYGSPIDY

SEQ ID NO: 122 - protein, 6 aa, Artificial Sequence
  Synthetic
QDVDTT

SEQ ID NO: 123 - protein, 9 aa, Artificial Sequence
  Synthetic
QQYSTYPLT

SEQ ID NO: 124 - protein, 119 aa, Artificial Sequence
  Synthetic
QVQLQQSGTELARPGASVKLSCKASGFTFTDYGINWVKQRTGQGLEWIGEIYPSSGNSYYNEKFKAKATLTADKSSSTAYMELRSLTSEDSAVYFCARSTYYGSPIDYWGQGTTLTVSS

SEQ ID NO: 125 - protein, 107 aa, Artificial Sequence
  Synthetic
DIVMTQSHKFMSTPVGDRVSITCKASQDVDTTVAWYQQKPGQSPKLLIYWASTRQIGVPDRFTGSGSGTDFTLTISNVQSEDLADYFCQQYSTYPLTFGGGTKLEIK

SEQ ID NO: 126 - protein, 8 aa, Artificial Sequence
  Synthetic
GFSLTSYA

SEQ ID NO: 127 - protein, 7 aa, Artificial Sequence
  Synthetic
IWTGGGT

SEQ ID NO: 128 - protein, 13 aa, Artificial Sequence
  Synthetic
ARIYDGYYRYFDV

SEQ ID NO: 129 - protein, 6 aa, Artificial Sequence
  Synthetic
QSVSND

SEQ ID NO: 130 - protein, 3 aa, Artificial Sequence
  Synthetic
YAS

SEQ ID NO: 131 - protein, 9 aa, Artificial Sequence
  Synthetic
QQDYSSPWT

SEQ ID NO: 132 - protein, 119 aa, Artificial Sequence
  Synthetic
QVQLKESGPGLVAPSQSLSITCTVSGFSLTSYAITWVRQSPGKGLEWLGLIWTGGGTNYNSALKSRLSISKDNSKSQVFLKMNSLQTDDTARYYCARIYDGYYRYFDVWGTGTTVTVSS

SEQ ID NO: 133 - protein, 107 aa, Artificial Sequence
  Synthetic
RIVLTQTPKFLLVSAGDRVTMTCKASQSVSNDVAWYQQKPGQSPKLLIYYASNRYTGVPDRFTGSGYGTDFTFTISTVQAEDLAVYFCQQDYSSPWTFGGGTKLEIK

SEQ ID NO: 134 - protein, 9 aa, Artificial Sequence
  Synthetic
NVLTMPTAY

SEQ ID NO: 135 - protein, 9 aa, Artificial Sequence
  Synthetic
QQYYSYPYT

SEQ ID NO: 136 - protein, 116 aa, Artificial Sequence
  Synthetic
EVQLQQSGAELVRSGASVKLSCTASGFNIKDYYMHWVKQRPEQGLDWIGWIDPENGDTEYAPKFQGKATMTADTSSNTAYLQLSSLTSEDTAVYYCNVLTMPTAYWGQGTLVTVSA

SEQ ID NO: 137 - protein, 113 aa, Artificial Sequence
  Synthetic
DIVMSQSPSSLAVSVGEKVIMSCKSSQSLLYSSNQKNYLAWYQQKPGQSPKLLIYWASTRESGVPDRFTGSGSGTDFTLTISSVKAEDLAVYYCQQYYSYPYTFGGGTKLEIK

SEQ ID NO: 138 - protein, 8 aa, Artificial Sequence
  Synthetic
GFTFSSYG

SEQ ID NO: 139 - protein, 8 aa, Artificial Sequence
  Synthetic
ITSGGSYT

SEQ ID NO: 140 - protein, 7 aa, Artificial Sequence
  Synthetic
ALWSLDY

SEQ ID NO: 141 - protein, 5 aa, Artificial Sequence
  Synthetic
SSLSY

SEQ ID NO: 142 - protein, 9 aa, Artificial Sequence
  Synthetic
HQRRSYPWT

SEQ ID NO: 143 - protein, 114 aa, Artificial Sequence
  Synthetic
EVQLMESGGDLVKPGGSLKLSCAASGFTFSSYGLSWVRQTPDKRLEWVATITSGGSYTYYPDSVKGRFTISRDNARNTLYLQMFSLKSEDTAMYYCALWSLDYWGQGTTLTVSS

SEQ ID NO: 144 - protein, 106 aa, Artificial Sequence
  Synthetic
QIVLTQSPAIMSASPGEKVTMTCSANSSLSYMHWYQQKPGTSPKRWIYDTSELASGVPARFSGSGSGTSYSLTISSMEAEDAATYYCHQRRSYPWTFGGGTKLEIK

SEQ ID NO: 145 - protein, 5 aa, Artificial Sequence
  Synthetic
DDYMY

SEQ ID NO: 146 - protein, 17 aa, Artificial Sequence
  Synthetic
WIDPENGDTEYASKFQD

SEQ ID NO: 147 - protein, 8 aa, Artificial Sequence
  Synthetic
WLRRGLDY

SEQ ID NO: 148 - protein, 16 aa, Artificial Sequence
  Synthetic
RSSKSLLHSNGYTYLF

SEQ ID NO: 149 - protein, 7 aa, Artificial Sequence
  Synthetic
RMSNLAS

SEQ ID NO: 150 - protein, 7 aa, Artificial Sequence
  Synthetic
GFNIKDD

SEQ ID NO: 151 - protein, 3 aa, Artificial Sequence
  Synthetic
ENG

SEQ ID NO: 152 - protein, 6 aa, Artificial Sequence
  Synthetic
LRRGLD

SEQ ID NO: 153 - protein, 12 aa, Artificial Sequence
  Synthetic
SKSLLHSNGYTY

SEQ ID NO: 154 - protein, 6 aa, Artificial Sequence
  Synthetic
HLEYPF

SEQ ID NO: 155 - protein, 6 aa, Artificial Sequence
  Synthetic
SGYYWN

SEQ ID NO: 156 - protein, 16 aa, Artificial Sequence
  Synthetic
YITFDGANNYNPSLKN

SEQ ID NO: 157 - protein, 10 aa, Artificial Sequence
  Synthetic
SSYDYDVLDY

SEQ ID NO: 158 - protein, 11 aa, Artificial Sequence
  Synthetic
RASQDISNFLN

SEQ ID NO: 159 - protein, 7 aa, Artificial Sequence
  Synthetic
YTSRLHS

SEQ ID NO: 160 - protein, 8 aa, Artificial Sequence
  Synthetic
GYSITSGY

SEQ ID NO: 161 - protein, 3 aa, Artificial Sequence
  Synthetic
FDG

SEQ ID NO: 162 - protein, 8 aa, Artificial Sequence
  Synthetic
SYDYDVLD

SEQ ID NO: 163 - protein, 7 aa, Artificial Sequence
  Synthetic
SQDISNF

SEQ ID NO: 164 - protein, 6 aa, Artificial Sequence
  Synthetic
GHTLPY

SEQ ID NO: 165 - protein, 5 aa, Artificial Sequence
  Synthetic
DYCIN

SEQ ID NO: 166 - protein, 17 aa, Artificial Sequence
  Synthetic
WIYPGSGNTRYSERFKG

SEQ ID NO: 167 - protein, 11 aa, Artificial Sequence
  Synthetic
EDYYPYHGMDY

SEQ ID NO: 168 - protein, 15 aa, Artificial Sequence
  Synthetic
RASESVDGYDNSFMH

SEQ ID NO: 169 - protein, 7 aa, Artificial Sequence
  Synthetic
RASNLES

SEQ ID NO: 170 - protein, 7 aa, Artificial Sequence
  Synthetic
GYSFTDY

SEQ ID NO: 171 - protein, 3 aa, Artificial Sequence
  Synthetic
GSG

SEQ ID NO: 172 - protein, 9 aa, Artificial Sequence
  Synthetic
DYYPYHGMD

SEQ ID NO: 173 - protein, 11 aa, Artificial Sequence
  Synthetic
SESVDGYDNSF

SEQ ID NO: 174 - protein, 6 aa, Artificial Sequence
  Synthetic
SSEDPW

SEQ ID NO: 175 - protein, 330 aa, Homo sapiens [sequence omitted]

SEQ ID NO: 176 - protein, 330 aa, Artificial Sequence
  Synthetic
ASTKGPSVFPLAPSSKSTSGGTAALGCLVKDYFPEPVTVSWNSGALTSGVHTFPAVLQSSGLYSLSSVVTVPSSSLGTQTYICNVNHKPSNTKVDKKVEPKSCDKTHTCPPCPAPEAAGGPSVFLFPPKPKDTLMISRTPEVTCVVVDVSHEDPEVKFNWYVDGVEVHNAKTKPREEQYNSTYRVVSVLTVLHQDWLNGKEYKCKVSNKALPAPIEKTISKAKGQPREPQVYTLPPSRDELTKNQVSLTCLVKGFYPSDIAVEWESNGQPENNYKTTPPVLDSDGSFFLYSKLTVDKSRWQQGNVFSCSVMHEALHNHYTQKSLSLSPGK

SEQ ID NO: 177 - protein, 107 aa, Artificial Sequence [sequence omitted]

SEQ ID NO: 178 - protein, 447 aa, Artificial Sequence
  Synthetic
EVQLQQSGAELVRPGASVKLSCTASGFNIKDDYMYWVKQRPEQGLEWIGWIDPENGDTEYASKFQDKATVTADTSSNTAYLQLSSLTSEDTAVYYCTLWLRRGLDYWGQGTSVTVSSASTKGPSVFPLAPSSKSTSGGTAALGCLVKDYFPEPVTVSWNSGALTSGVHTFPAVLQSSGLYSLSSVVTVPSSSLGTQTYICNVNHKPSNTKVDKKVEPKSCDKTHTCPPCPAPELLGGPSVFLFPPKPKDTLMISRTPEVTCVVVDVSHEDPEVKFNWYVDGVEVHNAKTKPREEQYNSTYRVVSVLTVLHQDWLNGKEYKCKVSNKALPAPIEKTISKAKGQPREPQVYTLPPSRDELTKNQVSLTCLVKGFYPSDIAVEWESNGQPENNYKTTPPVLDSDGSFFLYSKLTVDKSRWQQGNVFSCSVMHEALHNHYTQKSLSLSPGK

SEQ ID NO: 179 - protein, 219 aa, Artificial Sequence
  Synthetic
DIVMTQAAPSVPVTPGESVSISCRSSKSLLHSNGYTYLFWFLQRPGQSPQLLIYRMSNLASGVPDRFSGSGSGTAFTLRISRVEAEDVGVYYCMQHLEYPFTFGGGTKLEIKRTVAAPSVFIFPPSDEQLKSGTASVVCLLNNFYPREAKVQWKVDNALQSGNSQESVTEQDSKDSTYSLSSTLTLSKADYEKHKVYACEVTHQGLSSPVTKSFNRGEC

SEQ ID NO: 180 - protein, 449 aa, Artificial Sequence
  Synthetic
DVQLQESGPGLVKPSQSLSLTCSVTGYSITSGYYWNWIRQFPGNKLEWMGYITFDGANNYNPSLKNRISITRDTSKNQFFLKLTSVTTEDTATYYCTRSSYDYDVLDYWGQGTTLTVSSASTKGPSVFPLAPSSKSTSGGTAALGCLVKDYFPEPVTVSWNSGALTSGVHTFPAVLQSSGLYSLSSVVTVPSSSLGTQTYICNVNHKPSNTKVDKKVEPKSCDKTHTCPPCPAPELLGGPSVFLFPPKPKDTLMISRTPEVTCVVVDVSHEDPEVKFNWYVDGVEVHNAKTKPREEQYNSTYRVVSVLTVLHQDWLNGKEYKCKVSNKALPAPIEKTISKAKGQPREPQVYTLPPSRDELTKNQVSLTCLVKGFYPSDIAVEWESNGQPENNYKTTPPVLDSDGSFFLYSKLTVDKSRWQQGNVFSCSVMHEALHNHYTQKSLSLSPGK

SEQ ID NO: 181 - protein, 214 aa, Artificial Sequence
  Synthetic
DIQMTQTTSSLSASLGDRVTISCRASQDISNFLNWYQQRPDGTVKLLIYYTSRLHSGVPSRFSGSGSGTDFSLTVSNLEQEDIATYFCQQGHTLPYTFGGGTKLEIKRTVAAPSVFIFPPSDEQLKSGTASVVCLLNNFYPREAKVQWKVDNALQSGNSQESVTEQDSKDSTYSLSSTLTLSKADYEKHKVYACEVTHQGLSSPVTKSFNRGEC

SEQ ID NO: 182 - protein, 450 aa, Artificial Sequence
  Synthetic
QIQLQQSGPELVRPGASVKISCKASGYSFTDYCINWVNQRPGQGLEWIGWIYPGSGNTRYSERFKGKATLTVDTSSNTAYMQLSSLTSEDSAVYFCAREDYYPYHGMDYWGQGTSVTVSSASTKGPSVFPLAPSSKSTSGGTAALGCLVKDYFPEPVTVSWNSGALTSGVHTFPAVLQSSGLYSLSSVVTVPSSSLGTQTYICNVNHKPSNTKVDKKVEPKSCDKTHTCPPCPAPELLGGPSVFLFPPKPKDTLMISRTPEVTCVVVDVSHEDPEVKFNWYVDGVEVHNAKTKPREEQYNSTYRVVSVLTVLHQDWLNGKEYKCKVSNKALPAPIEKTISKAKGQPREPQVYTLPPSRDELTKNQVSLTCLVKGFYPSDIAVEWESNGQPENNYKTTPPVLDSDGSFFLYSKLTVDKSRWQQGNVFSCSVMHEALHNHYTQKSLSLSPGK

SEQ ID NO: 183 - protein, 218 aa, Artificial Sequence
  Synthetic
DIVLTQSPTSLAVSLGQRATISCRASESVDGYDNSFMHWYQQKPGQPPKLLIFRASNLESGIPARFSGSGSRTDFTLTINPVEAADVATYYCQQSSEDPWTFGGGTKLEIKRTVAAPSVFIFPPSDEQLKSGTASVVCLLNNFYPREAKVQWKVDNALQSGNSQESVTEQDSKDSTYSLSSTLTLSKADYEKHKVYACEVTHQGLSSPVTKSFNRGEC

SEQ ID NO: 184 - protein, 108 aa, Artificial Sequence
  Synthetic
ASTKGPSVFPLAPSSKSTSGGTAALGCLVKDYFPEPVTVSWNSGALTSGVHTFPAVLQSSGLYSLSSVVTVPSSSLGTQTYICNVNHKPSNTKVDKKVEPKSCDKTHT

SEQ ID NO: 185 - protein, 225 aa, Artificial Sequence
  Synthetic
EVQLQQSGAELVRPGASVKLSCTASGFNIKDDYMYWVKQRPEQGLEWIGWIDPENGDTEYASKFQDKATVTADTSSNTAYLQLSSLTSEDTAVYYCTLWLRRGLDYWGQGTSVTVSSASTKGPSVFPLAPSSKSTSGGTAALGCLVKDYFPEPVTVSWNSGALTSGVHTFPAVLQSSGLYSLSSVVTVPSSSLGTQTYICNVNHKPSNTKVDKKVEPKSCDKTHT

SEQ ID NO: 186 - protein, 227 aa, Artificial Sequence
  Synthetic
DVQLQESGPGLVKPSQSLSLTCSVTGYSITSGYYWNWIRQFPGNKLEWMGYITFDGANNYNPSLKNRISITRDTSKNQFFLKLTSVTTEDTATYYCTRSSYDYDVLDYWGQGTTLTVSSASTKGPSVFPLAPSSKSTSGGTAALGCLVKDYFPEPVTVSWNSGALTSGVHTFPAVLQSSGLYSLSSVVTVPSSSLGTQTYICNVNHKPSNTKVDKKVEPKSCDKTHT

SEQ ID NO: 187 - protein, 228 aa, Artificial Sequence
  Synthetic
QIQLQQSGPELVRPGASVKISCKASGYSFTDYCINWVNQRPGQGLEWIGWIYPGSGNTRYSERFKGKATLTVDTSSNTAYMQLSSLTSEDSAVYFCAREDYYPYHGMDYWGQGTSVTVSSASTKGPSVFPLAPSSKSTSGGTAALGCLVKDYFPEPVTVSWNSGALTSGVHTFPAVLQSSGLYSLSSVVTVPSSSLGTQTYICNVNHKPSNTKVDKKVEPKSCDKTHT

SEQ ID NO: 188 - protein, 8 aa, Artificial Sequence
  Synthetic
GYSFTSYW

SEQ ID NO: 189 - protein, 8 aa, Artificial Sequence
  Synthetic
IYPGDSDT

SEQ ID NO: 190 - protein, 15 aa, Artificial Sequence
  Synthetic
ARFPYDSSGYYSFDY

SEQ ID NO: 191 - protein, 6 aa, Artificial Sequence
  Synthetic
QSISSY

SEQ ID NO: 192 - protein, 3 aa, Artificial Sequence
  Synthetic
AAS

SEQ ID NO: 193 - protein, 9 aa, Artificial Sequence
  Synthetic
QQSYSTPLT

SEQ ID NO: 194 - protein, 5 aa, Artificial Sequence
  Synthetic
SYWIG

SEQ ID NO: 195 - protein, 18 aa, Artificial Sequence
  Synthetic
IIYPGDSDTRYSPSFQGQ

SEQ ID NO: 196 - protein, 13 aa, Artificial Sequence
  Synthetic
FPYDSSGYYSFDY

SEQ ID NO: 197 - protein, 11 aa, Artificial Sequence
  Synthetic
RASQSISSYLN

SEQ ID NO: 198 - protein, 7 aa, Artificial Sequence
  Synthetic
AASSLQS

SEQ ID NO: 199 - protein, 7 aa, Artificial Sequence
  Synthetic
GYSFTSY

SEQ ID NO: 200 - protein, 3 aa, Artificial Sequence
  Synthetic
GDS

SEQ ID NO: 201 - protein, 11 aa, Artificial Sequence
  Synthetic
PYDSSGYYSFD

SEQ ID NO: 202 - protein, 7 aa, Artificial Sequence
  Synthetic
SQSISSY

SEQ ID NO: 203 - protein, 6 aa, Artificial Sequence
  Synthetic
SYSTPL

SEQ ID NO: 204 - protein, 122 aa, Artificial Sequence
  Synthetic
QVQLVQSGAEVKKPGESLKISCKGSGYSFTSYWIGWVRQMPGKGLEWMGIIYPGDSDTRYSPSFQGQVTISADKSISTAYLQWSSLKASDTAMYYCARFPYDSSGYYSFDYWGQGTLVTVSS

SEQ ID NO: 205 - protein, 107 aa, Artificial Sequence [sequence omitted]

SEQ ID NO: 206 - protein, 243 aa, Artificial Sequence
  Synthetic
DIQMTQSPSSLSASVGDRVTITCRASQSISSYLNWYQQKPGKAPKLLIYAASSLQSGVPSRFSGSGSGTDFTLTISSLQPEDFATYYCQQSYSTPLTFGGGTKVEIKEGKSSGSGSESKASQVQLVQSGAEVKKPGESLKISCKGSGYSFTSYWIGWVRQMPGKGLEWMGIIYPGDSDTRYSPSFQGQVTISADKSISTAYLQWSSLKASDTAMYYCARFPYDSSGYYSFDYWGQGTLVTVSS

SEQ ID NO: 207 - protein, 231 aa, Artificial Sequence
  Synthetic
PKSCDKTHTCPPCPAPELLGGPSVFLFPPKPKDTLMISRTPEVTCVVVDVSHEDPEVKFNWYVDGVEVHNAKTKPREEQYNSTYRVVSVLTVLHQDWLNGKEYKCKVSNKALPAPIEKTISKAKGQPREPQVYTLPPSRDELTKNQVSLTCLVKGFYPSDIAVEWESNGQPENNYKTTPPVLDSDGSFFLYSKLTVDKSRWQQGNVFSCSVMHEALHNHYTQKSLSLSPGK

SEQ ID NO: 208 - protein, 481 aa, Artificial Sequence
  Synthetic
DIQMTQSPSSLSASVGDRVTITCRASQSISSYLNWYQQKPGKAPKLLIYAASSLQSGVPSRFSGSGSGTDFTLTISSLQPEDFATYYCQQSYSTPLTFGGGTKVEIKEGKSSGSGSESKASQVQLVQSGAEVKKPGESLKISCKGSGYSFTSYWIGWVRQMPGKGLEWMGIIYPGDSDTRYSPSFQGQVTISADKSISTAYLQWSSLKASDTAMYYCARFPYDSSGYYSFDYWGQGTLVTVSSDIEGRMDPKSCDKTHTCPPCPAPELLGGPSVFLFPPKPKDTLMISRTPEVTCVVVDVSHEDPEVKFNWYVDGVEVHNAKTKPREEQYNSTYRVVSVLTVLHQDWLNGKEYKCKVSNKALPAPIEKTISKAKGQPREPQVYTLPPSRDELTKNQVSLTCLVKGFYPSDIAVEWESNGQPENNYKTTPPVLDSDGSFFLYSKLTVDKSRWQQGNVFSCSVMHEALHNHYTQKSLSLSPGK

SEQ ID NO: 209 - protein, 481 aa, Artificial Sequence
  Synthetic
PKSCDKTHTCPPCPAPELLGGPSVFLFPPKPKDTLMISRTPEVTCVVVDVSHEDPEVKFNWYVDGVEVHNAKTKPREEQYNSTYRVVSVLTVLHQDWLNGKEYKCKVSNKALPAPIEKTISKAKGQPREPQVYTLPPSRDELTKNQVSLTCLVKGFYPSDIAVEWESNGQPENNYKTTPPVLDSDGSFFLYSKLTVDKSRWQQGNVFSCSVMHEALHNHYTQKSLSLSPGKDIEGRMDDIQMTQSPSSLSASVGDRVTITCRASQSISSYLNWYQQKPGKAPKLLIYAASSLQSGVPSRFSGSGSGTDFTLTISSLQPEDFATYYCQQSYSTPLTFGGGTKVEIKEGKSSGSGSESKASQVQLVQSGAEVKKPGESLKISCKGSGYSFTSYWIGWVRQMPGKGLEWMGIIYPGDSDTRYSPSFQGQVTISADKSISTAYLQWSSLKASDTAMYYCARFPYDSSGYYSFDYWGQGTLVTVSS

SEQ ID NO: 210 - protein, 453 aa, Artificial Sequence
  Synthetic
QVQLVQSGAEVKKPGESLKISCKGSGYSFTSYWIGWVRQMPGKGLEWMGIIYPGDSDTRYSPSFQGQVTISADKSISTAYLQWSSLKASDTAMYYCARFPYDSSGYYSFDYWGQGTLVTVSSASTKGPSVFPLAPSSKSTSGGTAALGCLVKDYFPEPVTVSWNSGALTSGVHTFPAVLQSSGLYSLSSVVTVPSSSLGTQTYICNVNHKPSNTKVDKKVEPKSCDKTHTCPPCPAPELLLGGPSVFLFPPKPKDTLMISRTPEVTCVVVDVSHEDPEVKFNWYVDGVEVHNAKTKPREEQYNSTYRVVSVLTVLHQDWLNGKEYKCKVSNKALPAPIEKTISKAKGQPREPQVYTLPPSRDELTKNQVSLTCLVKGFYPSDIAVEWESNGQPENNYKTTPPVLDSDGSFFLYSKLTVDKSRWQQGNVFSCSVMHEALHNHYTQKSLSLSPGK

SEQ ID NO: 211 - protein, 452 aa, Artificial Sequence
  Synthetic
QVQLVQSGAEVKKPGESLKISCKGSGYSFTSYWIGWVRQMPGKGLEWMGIIYPGDSDTRYSPSFQGQVTISADKSISTAYLQWSSLKASDTAMYYCARFPYDSSGYYSFDYWGQGTLVTVSSASTKGPSVFPLAPSSKSTSGGTAALGCLVKDYFPEPVTVSWNSGALTSGVHTFPAVLQSSGLYSLSSVVTVPSSSLGTQTYICNVNHKPSNTKVDKKVEPKSCDKTHTCPPCPAPEAAGGPSVFLFPPKPKDTLMISRTPEVTCVVVDVSHEDPEVKFNWYVDGVEVHNAKTKPREEQYNSTYRVVSVLTVLHQDWLNGKEYKCKVSNKALPAPIEKTISKAKGQPREPQVYTLPPSRDELTKNQVSLTCLVKGFYPSDIAVEWESNGQPENNYKTTPPVLDSDGSFFLYSKLTVDKSRWQQGNVFSCSVMHEALHNHYTQKSLSLSPGK

SEQ ID NO: 212 - protein, 214 aa, Artificial Sequence
  Synthetic
DIQMTQSPSSLSASVGDRVTITCRASQSISSYLNWYQQKPGKAPKLLIYAASSLQSGVPSRFSGSGSGTDFTLTISSLQPEDFATYYCQQSYSTPLTFGGGTKVEIKRTVAAPSVFIFPPSDEQLKSGTASVVCLLNNFYPREAKVQWKVDNALQSGNSQESVTEQDSKDSTYSLSSTLTLSKADYEKHKVYACEVTHQGLSSPVTKSFNRGEC

SEQ ID NO: 213 - protein, 232 aa, Artificial Sequence
  Synthetic
QVQLVQSGAEVKKPGESLKISCKGSGYSFTSYWIGWVRQMPGKGLEWMGIIYPGDSDTRYSPSFQGQVTISADKSISTAYLQWSSLKASDTAMYYCARFPYDSSGYYSFDYWGQGTLVTVSSASTKGPSVFPLAPSSKSTSGGTAALGCLVKDYFPEPVTVSWNSGALTSGVHTFPAVLQSSGLYSLSSVVTVPSSSLGTQTYICNVNHKPSNTKVDKKVEPKSCDKTHTCP

SEQ ID NO: 214 - protein, 19 aa, Artificial Sequence
  Synthetic
MGWSCIILFLVATATGVHS

SEQ ID NO: 215 - protein, 14 aa, Artificial Sequence
  Synthetic
EGKSSGSGSESKAS

SEQ ID NO: 216 - protein, 5 aa, Artificial Sequence
  Synthetic
SYWMH

SEQ ID NO: 217 - protein, 17 aa, Artificial Sequence
  Synthetic
EINPTNGRTNYIEKFKS

SEQ ID NO: 218 - protein, 7 aa, Artificial Sequence
  Synthetic
GTRAYHY

SEQ ID NO: 219 - protein, 11 aa, Artificial Sequence
  Synthetic
RASDNLYSNLA

SEQ ID NO: 220 - protein, 7 aa, Artificial Sequence
  Synthetic
DATNLAD

SEQ ID NO: 221 - protein, 9 aa, Artificial Sequence
  Synthetic
QHFWGTPLT

SEQ ID NO: 222 - protein, 7 aa, Artificial Sequence
  Synthetic
GYTFTSY

SEQ ID NO: 223 - protein, 6 aa, Artificial Sequence
  Synthetic
NPTNGR

SEQ ID NO: 224 - protein, 6 aa, Artificial Sequence
  Synthetic
TSYWMH

SEQ ID NO: 225 - protein, 13 aa, Artificial Sequence
  Synthetic
WIGEINPTNGRTN

SEQ ID NO: 226 - protein, 6 aa, Artificial Sequence
  Synthetic
ARGTRA

SEQ ID NO: 227 - protein, 7 aa, Artificial Sequence
  Synthetic
YSNLAWY

SEQ ID NO: 228 - protein, 10 aa, Artificial Sequence
  Synthetic
LLVYDATNLA

SEQ ID NO: 229 - protein, 8 aa, Artificial Sequence
  Synthetic
QHFWGTPL

SEQ ID NO: 230 - protein, 116 aa, Artificial Sequence
  Synthetic
QVQLQQPGAELVKPGASVKLSCKASGYTFTSYWMHWVKQRPGQGLEWIGEINPTNGRTNYIEKFKSKATLTVDKSSSTAYMQLSSLTSEDSAVYYCARGTRAYHYWGQGTSVTVSS

SEQ ID NO: 231 - protein, 107 aa, Artificial Sequence
  Synthetic
DIQMTQSPASLSVSVGETVTITCRASDNLYSNLAWYQQKQGKSPQLLVYDATNLADGVPSRFSGSGSGTQYSLKINSLQSEDFGTYYCQHFWGTPLTFGAGTKLELK

SEQ ID NO: 232 - protein, 9 aa, Artificial Sequence
  Synthetic
QHFAGTPLT

SEQ ID NO: 233 - protein, 8 aa, Artificial Sequence
  Synthetic
QHFAGTPL

SEQ ID NO: 234 - protein, 116 aa, Artificial Sequence
  Synthetic
EVQLVQSGAEVKKPGASVKVSCKASGYTFTSYWMHWVRQAPGQRLEWIGEINPTNGRTNYIEKFKSRATLTVDKSASTAYMELSSLRSEDTAVYYCARGTRAYHYWGQGTMVTVSS

SEQ ID NO: 235 - protein, 107 aa, Artificial Sequence
  Synthetic
DIQMTQSPSSLSASVGDRVTITCRASDNLYSNLAWYQQKPGKSPKLLVYDATNLADGVPSRFSGSGSGTDYTLTISSLQPEDFATYYCQHFWGTPLTFGQGTKVEIK

SEQ ID NO: 236 - protein, 446 aa, Artificial Sequence
  Synthetic
QVQLQQPGAELVKPGASVKLSCKASGYTFTSYWMHWVKQRPGQGLEWIGEINPTNGRTNYIEKFKSKATLTVDKSSSTAYMQLSSLTSEDSAVYYCARGTRAYHYWGQGTSVTVSSASTKGPSVFPLAPSSKSTSGGTAALGCLVKDYFPEPVTVSWNSGALTSGVHTFPAVLQSSGLYSLSSVVTVPSSSLGTQTYICNVNHKPSNTKVDKKVEPKSCDKTHTCPPCPAPELLGGPSVFLFPPKPKDTLMISRTPEVTCVVVDVSHEDPEVKFNWYVDGVEVHNAKTKPREEQYNSTYRVVSVLTVLHQDWLNGKEYKCKVSNKALPAPIEKTISKAKGQPREPQVYTLPPSRDELTKNQVSLTCLVKGFYPSDIAVEWESNGQPENNYKTTPPVLDSDGSFFLYSKLTVDKSRWQQGNVFSCSVMHEALHNHYTQKSLSLSPGK

SEQ ID NO: 237 - protein, 214 aa, Artificial Sequence
  Synthetic
DIQMTQSPASLSVSVGETVTITCRASDNLYSNLAWYQQKQGKSPQLLVYDATNLADGVPSRFSGSGSGTQYSLKINSLQSEDFGTYYCQHFWGTPLTFGAGTKLELKRTVAAPSVFIFPPSDEQLKSGTASVVCLLNNFYPREAKVQWKVDNALQSGNSQESVTEQDSKDSTYSLSSTLTLSKADYEKHKVYACEVTHQGLSSPVTKSFNRGEC

SEQ ID NO: 238 - protein, 446 aa, Artificial Sequence
  Synthetic
EVQLVQSGAEVKKPGASVKVSCKASGYTFTSYWMHWVRQAPGQRLEWIGEINPTNGRTNYIEKFKSRATLTVDKSASTAYMELSSLRSEDTAVYYCARGTRAYHYWGQGTMVTVSSASTKGPSVFPLAPSSKSTSGGTAALGCLVKDYFPEPVTVSWNSGALTSGVHTFPAVLQSSGLYSLSSVVTVPSSSLGTQTYICNVNHKPSNTKVDKKVEPKSCDKTHTCPPCPAPELLGGPSVFLFPPKPKDTLMISRTPEVTCVVVDVSHEDPEVKFNWYVDGVEVHNAKTKPREEQYNSTYRVVSVLTVLHQDWLNGKEYKCKVSNKALPAPIEKTISKAKGQPREPQVYTLPPSRDELTKNQVSLTCLVKGFYPSDIAVEWESNGQPENNYKTTPPVLDSDGSFFLYSKLTVDKSRWQQGNVFSCSVMHEALHNHYTQKSLSLSPGK

SEQ ID NO: 239 - protein, 214 aa, Artificial Sequence
  Synthetic
DIQMTQSPSSLSASVGDRVTITCRASDNLYSNLAWYQQKPGKSPKLLVYDATNLADGVPSRFSGSGSGTDYTLTISSLQPEDFATYYCQHFWGTPLTFGQGTKVEIKRTVAAPSVFIFPPSDEQLKSGTASVVCLLNNFYPREAKVQWKVDNALQSGNSQESVTEQDSKDSTYSLSSTLTLSKADYEKHKVYACEVTHQGLSSPVTKSFNRGEC

SEQ ID NO: 240 - protein, 226 aa, Artificial Sequence
  Synthetic
QVQLQQPGAELVKPGASVKLSCKASGYTFTSYWMHWVKQRPGQGLEWIGEINPTNGRTNYIEKFKSKATLTVDKSSSTAYMQLSSLTSEDSAVYYCARGTRAYHYWGQGTSVTVSSASTKGPSVFPLAPSSKSTSGGTAALGCLVKDYFPEPVTVSWNSGALTSGVHTFPAVLQSSGLYSLSSVVTVPSSSLGTQTYICNVNHKPSNTKVDKKVEPKSCDKTHTCP

SEQ ID NO: 241 - protein, 226 aa, Artificial Sequence
  Synthetic
EVQLVQSGAEVKKPGASVKVSCKASGYTFTSYWMHWVRQAPGQRLEWIGEINPTNGRTNYIEKFKSRATLTVDKSASTAYMELSSLRSEDTAVYYCARGTRAYHYWGQGTMVTVSSASTKGPSVFPLAPSSKSTSGGTAALGCLVKDYFPEPVTVSWNSGALTSGVHTFPAVLQSSGLYSLSSVVTVPSSSLGTQTYICNVNHKPSNTKVDKKVEPKSCDKTHTCP

SEQ ID NO: 242 - protein, 760 aa, Homo sapiens
MMDQARSAFSNLFGGEPLSYTRFSLARQVDGDNSHVEMKLAVDEEENADNNTKANVTKPKRCSGSICYGTIAVIVFFLIGFMIGYLGYCKGVEPKTECERLAGTESPVREEPGEDFPAARRLYWDDLKRKLSEKLDSTDFTGTIKLLNENSYVPREAGSQKDENLALYVENQFREFKLSKVWRDQHFVKIQVKDSAQNSVIIVDKNGRLVYLVENPGGYVAYSKAATVTGKLVHANFGTKKDFEDLYTPVNGSIVIVRAGKITFAEKVANAESLNAIGVLIYMDQTKFPIVNAELSFFGHAHLGTGDPYTPGFPSFNHTQFPPSRSSGLPNIPVQTISRAAAEKLFGNMEGDCPSDWKTDSTCRMVTSESKNVKLTVSNVLKEIKILNIFGVIKGFVEPDHYVVVGAQRDAWGPGAAKSGVGTALLLKLAQMFSDMVLKDGFQPSRSIIFASWSAGDFGSVGATEWLEGYLSSLHLKAFTYINLDKAVLGTSNFKVSASPLLYTLIEKTMQNVKHPVTGQFLYQDSNWASKVEKLTLDNAAFPFLAYSGIPAVSFCFCEDTDYPYLGTTMDTYKELIERIPELNKVARAAAEVAGQFVIKLTHDVELNLDYERYNSQLLSFVRDLNQYRADIKEMGLSLQWLYSARGDFFRATSRLTTDFGNAEKTDRFVMKKLNDRVMRVEYHFLSPYVSPKESPFRHVFWGSGSHTLPALLENLKLRKQNNGAFNETLFRNQLALATWTIQGAANALSGDVWDIDNEF

SEQ ID NO: 243 - protein, 760 aa, Macaca mulatta
MMDQARSAFSNLFGGEPLSYTRFSLARQVDGDNSHVEMKLGVDEEENTDNNTKPNGTKPKRCGGNICYGTIAVIIFFLIGFMIGYLGYCKGVEPKTECERLAGTESPAREEPEEDFPAAPRLYWDDLKRKLSEKLDTTDFTSTIKLLNENLYVPREAGSQKDENLALYIENQFREFKLSKVWRDQHFVKIQVKDSAQNSVIIVDKNGGLVYLVENPGGYVAYSKAATVTGKLVHANFGTKKDFEDLDSPVNGSIVIVRAGKITFAEKVANAESLNAIGVLIYMDQTKFPIVKADLSFFGHAHLGTGDPYTPGFPSFNHTQFPPSQSSGLPNIPVQTISRAAAEKLFGNMEGDCPSDWKTDSTCKMVTSENKSVKLTVSNVLKETKILNIFGVIKGFVEPDHYVVVGAQRDAWGPGAAKSSVGTALLLKLAQMFSDMVLKDGFQPSRSIIFASWSAGDFGSVGATEWLEGYLSSLHLKAFTYINLDKAVLGTSNFKVSASPLLYTLIEKTMQDVKHPVTGRSLYQDSNWASKVEKLTLDNAAFPFLAYSGIPAVSFCFCEDTDYPYLGTTMDTYKELVERIPELNKVARAAAEVAGQFVIKLTHDTELNLDYERYNSQLLLFLRDLNQYRADVKEMGLSLQWLYSARGDFFRATSRLTTDFRNAEKRDKFVMKKLNDRVMRVEYYFLSPYVSPKESPFRHVFWGSGSHTLSALLESLKLRRQNNSAFNETLFRNQLALATWTIQGAANALSGDVWDIDNEF

SEQ ID NO: 244 - protein, 760 aa, Macaca fascicularis
MMDQARSAFSNLFGGEPLSYTRFSLARQVDGDNSHVEMKLGVDEEENTDNNTKANGTKPKRCGGNICYGTIAVIIFFLIGFMIGYLGYCKGVEPKTECERLAGTESPAREEPEEDFPAAPRLYWDDLKRKLSEKLDTTDFTSTIKLLNENLYVPREAGSQKDENLALYIENQFREFKLSKVWRDQHFVKIQVKDSAQNSVIIVDKNGGLVYLVENPGGYVAYSKAATVTGKLVHANFGTKKDFEDLDSPVNGSIVIVRAGKITFAEKVANAESLNAIGVLIYMDQTKFPIVKADLSFFGHAHLGTGDPYTPGFPSFNHTQFPPSQSSGLPNIPVQTISRAAAEKLFGNMEGDCPSDWKTDSTCKMVTSENKSVKLTVSNVLKETKILNIFGVIKGFVEPDHYVVVGAQRDAWGPGAAKSSVGTALLLKLAQMFSDMVLKDGFQPSRSIIFASWSAGDFGSVGATEWLEGYLSSLHLKAFTYINLDKAVLGTSNFKVSASPLLYTLIEKTMQDVKHPVTGRSLYQDSNWASKVEKLTLDNAAFPFLAYSGIPAVSFCFCEDTDYPYLGTTMDTYKELVERIPELNKVARAAAEVAGQFVIKLTHDTELNLDYERYNSQLLLFLRDLNQYRADVKEMGLSLQWLYSARGDFFRATSRLTTDFRNAEKRDKFVMKKLNDRVMRVEYYFLSPYVSPKESPFRHVFWGSGSHTLSALLESLKLRRQNNSAFNETLFRNQLALATWTIQGAANALSGDVWDIDNEF

SEQ ID NO: 245 - protein, 763 aa, Mus musculus
MMDQARSAFSNLFGGEPLSYTRFSLARQVDGDNSHVEMKLAADEEENADNNMKASVRKPKRFNGRLCFAAIALVIFFLIGFMSGYLGYCKRVEQKEECVKLAETEETDKSETMETEDVPTSSRLYWADLKTLLSEKLNSIEFADTIKQLSQNTYTPREAGSQKDESLAYYIENQFHEFKFSKVWRDEHYVKIQVKSSIGQNMVTIVQSNGNLDPVESPEGYVAFSKPTEVSGKLVHANFGTKKDFEELSYSVNGSLVIVRAGEITFAEKVANAQSFNAIGVLIYMDKNKFPVVEADLALFGHAHLGTGDPYTPGFPSFNHTQFPPSQSSGLPNIPVQTISRAAAEKLFGKMEGSCPARWNIDSSCKLELSQNQNVKLIVKNVLKERRILNIFGVIKGYEEPDRYVVVGAQRDALGAGVAAKSSVGTGLLLKLAQVFSDMISKDGFRPSRSIIFASWTAGDFGAVGATEWLEGYLSSLHLKAFTYINLDKVVLGTSNFKVSASPLLYTLMGKIMQDVKHPVDGKSLYRDSNWISKVEKLSFDNAAYPFLAYSGIPAVSFCFCEDADYPYLGTRLDTYEALTQKVPQLNQMVRTAAEVAGQLIIKLTHDVELNLDYEMYNSKLLSFMKDLNQFKTDIRDMGLSLQWLYSARGDYFRATSRLTTDFHNAEKTNRFVMREINDRIMKVEYHFLSPYVSPRESPFRHIFWGSGSHTLSALVENLKLRQKNITAFNETLFRNQLALATWTIQGVANALSGDIWNIDNEF

SEQ ID NO: 246 - protein, 197 aa, Artificial Sequence
  Synthetic
FVKIQVKDSAQNSVIIVDKNGRLVYLVENPGGYVAYSKAATVTGKLVHANFGTKKDFEDLYTPVNGSIVIVRAGKITFAEKVANAESLNAIGVLIYMDQTKFPIVNAELSFFGHAHLGTGDPYTPGFPSFNHTQFPPSRSSGLPNIPVQTISRAAAEKLFGNMEGDCPSDWKTDSTCRMVTSESKNVKLTVSNVLKE

SEQ ID NO: 247 - protein, 7 aa, Artificial Sequence
  Synthetic
DIEGRMD

SEQ ID NO: 248 - protein, 7 aa, Artificial Sequence
  Synthetic
ASSLNIA

SEQ ID NO: 249 - protein, 12 aa, Artificial Sequence
  Synthetic
SKTFNTHPQSTP

SEQ ID NO: 250 - protein, 12 aa, Artificial Sequence
  Synthetic
TARGEHKEEELI

SEQ ID NO: 251 - protein, 9 aa, Artificial Sequence
  Synthetic
CQAQGQLVC

SEQ ID NO: 252 - protein, 9 aa, Artificial Sequence
  Synthetic
CSERSMNFC

SEQ ID NO: 253 - protein, 9 aa, Artificial Sequence
  Synthetic
CPKTRRVPC

SEQ ID NO: 254 - protein, 20 aa, Artificial Sequence
  Synthetic
WLSEAGPVVTVRALRGTGSW

SEQ ID NO: 255 - protein, 9 aa, Artificial Sequence
  Synthetic
CMQHSMRVC

SEQ ID NO: 256 - protein, 7 aa, Artificial Sequence
  Synthetic
DDTRHWG

SEQ ID NO: 257 - protein, 5 aa, Artificial Sequence
  Synthetic
  misc_feature (3)..(3): Xaa can be any naturally occurring amino acid
LPXTG

SEQ ID NO: 258 - skipped

SEQ ID NO: 259 - DNA, 21 bp, Artificial Sequence
  Synthetic
  misc_feature (1)..(21): phosphorothioate linkage
  misc_feature (2)..(6): modified by 2'-MOE
  misc_feature (17)..(21): modified by 2'-MOE
accattttcttccacagggct

SEQ ID NO: 260 - DNA, 25 bp, Artificial Sequence
  Synthetic
gggcattttaatatatctctgaact

SEQ ID NO: 261 - RNA, 25 nt, Artificial Sequence
  Synthetic
ggccaaaccucggcuuaccugaaau

SEQ ID NO: 262 - protein, 8 aa, Artificial Sequence
  Synthetic
IDPETGDT

SEQ ID NO: 263 - protein, 17 aa, Artificial Sequence
  Synthetic
WIDPETGDTEYASKFQD

SEQ ID NO: 264 - skipped

SEQ ID NO: 265 - protein, 17 aa, Artificial Sequence
  Synthetic
WIDPESGDTEYASKFQD

SEQ ID NO: 266 - protein, 8 aa, Artificial Sequence
  Synthetic
GYSFTDYY

SEQ ID NO: 267 - protein, 5 aa, Artificial Sequence
  Synthetic
DYYIN

SEQ ID NO: 268 - protein, 8 aa, Artificial Sequence
  Synthetic
GYSFTDYD

SEQ ID NO: 269 - protein, 5 aa, Artificial Sequence
  Synthetic
DYDIN

SEQ ID NO: 270 - protein, 3 aa, Artificial Sequence
  Synthetic
ETG

SEQ ID NO: 271 - protein, 3 aa, Artificial Sequence
  Synthetic
ESG

SEQ ID NO: 272 - protein, 25 aa, Artificial Sequence [sequence omitted]

SEQ ID NO: 273 - protein, 13 aa, Artificial Sequence
  Synthetic
WVRQAPGKGLEWV

SEQ ID NO: 274 - protein, 30 aa, Artificial Sequence
  Synthetic
RFTISRDNSKNTLYLQMNSLRAEDTAVYYC

SEQ ID NO: 275 - protein, 11 aa, Artificial Sequence
  Synthetic
WGQGTLVTVSS

SEQ ID NO: 276 - protein, 25 aa, Artificial Sequence [sequence omitted]

SEQ ID NO: 277 - protein, 13 aa, Artificial Sequence
  Synthetic
WVRQAPGQGLEWM

SEQ ID NO: 278 - protein, 30 aa, Artificial Sequence
  Synthetic
RVTITADTSTSTAYMELSSLRSEDTAVYYC

SEQ ID NO: 279 - protein, 10 aa, Artificial Sequence
  Synthetic
FGQGTKVEIK

SEQ ID NO: 280 - protein, 25 aa, Artificial Sequence
  Synthetic
QVQLQESGPGLVKPSQTLSLTCTVS

SEQ ID NO: 281 - protein, 13 aa, Artificial Sequence
  Synthetic
WIRQPPGKGLEWI

SEQ ID NO: 282 - protein, 30 aa, Artificial Sequence
  Synthetic
RVTISVDTSKNQFSLKLSSVTAADTAVYYC

SEQ ID NO: 283 - protein, 23 aa, Artificial Sequence
  Synthetic
DIVMTQSPDSLAVSLGERATINC

SEQ ID NO: 284 - protein, 23 aa, Artificial Sequence
  Synthetic
DIQMTQSPSSLSASVGDRVTITC

SEQ ID NO: 285 - protein, 15 aa, Artificial Sequence
  Synthetic
WYQQKPGKAPKLLIY

SEQ ID NO: 286 - protein, 32 aa, Artificial Sequence
  Synthetic
GVPSRFSGSGSGTDFTLTISSLQPEDFATYYC

SEQ ID NO: 287 - protein, 15 aa, Artificial Sequence
  Synthetic
WYQQKPGQPPKLLIY

SEQ ID NO: 288 - protein, 23 aa, Artificial Sequence
  Synthetic
DIVMTQSPLSLPVTPGEPASISC

SEQ ID NO: 289 - protein, 15 aa, Artificial Sequence
  Synthetic
WYLQKPGQSPQLLIY

SEQ ID NO: 290 - protein, 32 aa, Artificial Sequence
  Synthetic
GVPDRFSGSGSGTDFTLKISRVEAEDVGVYYC

SEQ ID NO: 291 - protein, 32 aa, Artificial Sequence
  Synthetic
GVPDRFSGSGSGTDFTLTISSLQAEDFAVYYC

SEQ ID NO: 292-299 - skipped (8 entries)

SEQ ID NO: 300 - protein, 447 aa, Artificial Sequence
  Synthetic
EVQLQQSGAELVRPGASVKLSCTASGFNIKDDYMYWVKQRPEQGLEWIGWIDPETGDTEYASKFQDKATVTADTSSNTAYLQLSSLTSEDTAVYYCTLWLRRGLDYWGQGTSVTVSSASTKGPSVFPLAPSSKSTSGGTAALGCLVKDYFPEPVTVSWNSGALTSGVHTFPAVLQSSGLYSLSSVVTVPSSSLGTQTYICNVNHKPSNTKVDKKVEPKSCDKTHTCPPCPAPELLGGPSVFLFPPKPKDTLMISRTPEVTCVVVDVSHEDPEVKFNWYVDGVEVHNAKTKPREEQYNSTYRVVSVLTVLHQDWLNGKEYKCKVSNKALPAPIEKTISKAKGQPREPQVYTLPPSRDELTKNQVSLTCLVKGFYPSDIAVEWESNGQPENNYKTTPPVLDSDGSFFLYSKLTVDKSRWQQGNVFSCSVMHEALHNHYTQKSLSLSPGK

SEQ ID NO: 301 - protein, 447 aa, Artificial Sequence
  Synthetic
EVQLQQSGAELVRPGASVKLSCTASGFNIKDDYMYWVKQRPEQGLEWIGWIDPESGDTEYASKFQDKATVTADTSSNTAYLQLSSLTSEDTAVYYCTLWLRRGLDYWGQGTSVTVSSASTKGPSVFPLAPSSKSTSGGTAALGCLVKDYFPEPVTVSWNSGALTSGVHTFPAVLQSSGLYSLSSVVTVPSSSLGTQTYICNVNHKPSNTKVDKKVEPKSCDKTHTCPPCPAPELLGGPSVFLFPPKPKDTLMISRTPEVTCVVVDVSHEDPEVKFNWYVDGVEVHNAKTKPREEQYNSTYRVVSVLTVLHQDWLNGKEYKCKVSNKALPAPIEKTISKAKGQPREPQVYTLPPSRDELTKNQVSLTCLVKGFYPSDIAVEWESNGQPENNYKTTPPVLDSDGSFFLYSKLTVDKSRWQQGNVFSCSVMHEALHNHYTQKSLSLSPGK

SEQ ID NO: 302 - protein, 450 aa, Artificial Sequence
  Synthetic
QIQLQQSGPELVRPGASVKISCKASGYSFTDYYINWVNQRPGQGLEWIGWIYPGSGNTRYSERFKGKATLTVDTSSNTAYMQLSSLTSEDSAVYFCAREDYYPYHGMDYWGQGTSVTVSSASTKGPSVFPLAPSSKSTSGGTAALGCLVKDYFPEPVTVSWNSGALTSGVHTFPAVLQSSGLYSLSSVVTVPSSSLGTQTYICNVNHKPSNTKVDKKVEPKSCDKTHTCPPCPAPELLGGPSVFLFPPKPKDTLMISRTPEVTCVVVDVSHEDPEVKFNWYVDGVEVHNAKTKPREEQYNSTYRVVSVLTVLHQDWLNGKEYKCKVSNKALPAPIEKTISKAKGQPREPQVYTLPPSRDELTKNQVSLTCLVKGFYPSDIAVEWESNGQPENNYKTTPPVLDSDGSFFLYSKLTVDKSRWQQGNVFSCSVMHEALHNHYTQKSLSLSPGK

SEQ ID NO: 303 - protein, 450 aa, Artificial Sequence
  Synthetic
QIQLQQSGPELVRPGASVKISCKASGYSFTDYDINWVNQRPGQGLEWIGWIYPGSGNTRYSERFKGKATLTVDTSSNTAYMQLSSLTSEDSAVYFCAREDYYPYHGMDYWGQGTSVTVSSASTKGPSVFPLAPSSKSTSGGTAALGCLVKDYFPEPVTVSWNSGALTSGVHTFPAVLQSSGLYSLSSVVTVPSSSLGTQTYICNVNHKPSNTKVDKKVEPKSCDKTHTCPPCPAPELLGGPSVFLFPPKPKDTLMISRTPEVTCVVVDVSHEDPEVKFNWYVDGVEVHNAKTKPREEQYNSTYRVVSVLTVLHQDWLNGKEYKCKVSNKALPAPIEKTISKAKGQPREPQVYTLPPSRDELTKNQVSLTCLVKGFYPSDIAVEWESNGQPENNYKTTPPVLDSDGSFFLYSKLTVDKSRWQQGNVFSCSVMHEALHNHYTQKSLSLSPGK

SEQ ID NO: 304 - protein, 225 aa, Artificial Sequence
  Synthetic
EVQLQQSGAELVRPGASVKLSCTASGFNIKDDYMYWVKQRPEQGLEWIGWIDPETGDTEYASKFQDKATVTADTSSNTAYLQLSSLTSEDTAVYYCTLWLRRGLDYWGQGTSVTVSSASTKGPSVFPLAPSSKSTSGGTAALGCLVKDYFPEPVTVSWNSGALTSGVHTFPAVLQSSGLYSLSSVVTVPSSSLGTQTYICNVNHKPSNTKVDKKVEPKSCDKTHT

SEQ ID NO: 305 - protein, 225 aa, Artificial Sequence
  Synthetic
EVQLQQSGAELVRPGASVKLSCTASGFNIKDDYMYWVKQRPEQGLEWIGWIDPESGDTEYASKFQDKATVTADTSSNTAYLQLSSLTSEDTAVYYCTLWLRRGLDYWGQGTSVTVSSASTKGPSVFPLAPSSKSTSGGTAALGCLVKDYFPEPVTVSWNSGALTSGVHTFPAVLQSSGLYSLSSVVTVPSSSLGTQTYICNVNHKPSNTKVDKKVEPKSCDKTHT

SEQ ID NO: 306 - protein, 228 aa, Artificial Sequence
  Synthetic
QIQLQQSGPELVRPGASVKISCKASGYSFTDYYINWVNQRPGQGLEWIGWIYPGSGNTRYSERFKGKATLTVDTSSNTAYMQLSSLTSEDSAVYFCAREDYYPYHGMDYWGQGTSVTVSSASTKGPSVFPLAPSSKSTSGGTAALGCLVKDYFPEPVTVSWNSGALTSGVHTFPAVLQSSGLYSLSSVVTVPSSSLGTQTYICNVNHKPSNTKVDKKVEPKSCDKTHT

SEQ ID NO: 307 - protein, 228 aa, Artificial Sequence
  Synthetic
QIQLQQSGPELVRPGASVKISCKASGYSFTDYDINWVNQRPGQGLEWIGWIYPGSGNTRYSERFKGKATLTVDTSSNTAYMQLSSLTSEDSAVYFCAREDYYPYHGMDYWGQGTSVTVSSASTKGPSVFPLAPSSKSTSGGTAALGCLVKDYFPEPVTVSWNSGALTSGVHTFPAVLQSSGLYSLSSVVTVPSSSLGTQTYICNVNHKPSNTKVDKKVEPKSCDKTHT

SEQ ID NO: 308 - protein, 230 aa, Artificial Sequence
  Synthetic
QVQLVQSGAEVKKPGESLKISCKGSGYSFTSYWIGWVRQMPGKGLEWMGIIYPGDSDTRYSPSFQGQVTISADKSISTAYLQWSSLKASDTAMYYCARFPYDSSGYYSFDYWGQGTLVTVSSASTKGPSVFPLAPSSKSTSGGTAALGCLVKDYFPEPVTVSWNSGALTSGVHTFPAVLQSSGLYSLSSVVTVPSSSLGTQTYICNVNHKPSNTKVDKKVEPKSCDKTHT

SEQ ID NO: 309 - DNA, 21 bp, Artificial Sequence
  Synthetic
caggtgacagttcaggtgcag

SEQ ID NO: 310 - DNA, 21 bp, Artificial Sequence
  Synthetic
tccaccctgactccaggtgac

SEQ ID NO: 311 - DNA, 22 bp, Artificial Sequence
  Synthetic
gagaaggaaataagacccagtt

SEQ ID NO: 312 - DNA, 22 bp, Artificial Sequence
  Synthetic
ccttctctctgcctctcagctt

SEQ ID NO: 313 - DNA, 19 bp, Artificial Sequence
  Synthetic
ccaccctctgtctgtctcc

SEQ ID NO: 314 - DNA, 23 bp, Artificial Sequence
  Synthetic
tccgctgggtggtgggaaaagaa

SEQ ID NO: 315 - DNA, 21 bp, Artificial Sequence
  Synthetic
atgggctccgctgggtggtgg

SEQ ID NO: 316 - DNA, 18 bp, Artificial Sequence
  Synthetic
acgatgggctccgctggg

SEQ ID NO: 317 - DNA, 20 bp, Artificial Sequence
  Synthetic
ccatccttgggcagagacct

SEQ ID NO: 318 - DNA, 21 bp, Artificial Sequence
  Synthetic
atgaccaggtactgagaaggg

SEQ ID NO: 319 - DNA, 21 bp, Artificial Sequence
  Synthetic
aggtactgagaagggttcgtc

SEQ ID NO: 320 - DNA, 22 bp, Artificial Sequence
  Synthetic
tagggacctgcggagagggcga

SEQ ID NO: 321 - DNA, 21 bp, Artificial Sequence
  Synthetic
gcctagggacctgcgggagag

SEQ ID NO: 322 - DNA, 22 bp, Artificial Sequence
  Synthetic
gccttttattcgcgagggtcgg

SEQ ID NO: 323 - DNA, 23 bp, Artificial Sequence
  Synthetic
tggagggccttttattcgcgagg

SEQ ID NO: 324 - DNA, 22 bp, Artificial Sequence
  Synthetic
taggcactcacccactgcaaga

SEQ ID NO: 325 - DNA, 21 bp, Artificial Sequence
  Synthetic
cggagctcaccaggtagttct

SEQ ID NO: 326 - DNA, 21 bp, Artificial Sequence
  Synthetic
agggcagtgcttacctgaggg

SEQ ID NO: 327 - RNA, 25 nt, Artificial Sequence
  Synthetic
acugcgcgcaggucuagccaggaag

SEQ ID NO: 328 - RNA, 30 nt, Artificial Sequence
  Synthetic
ugcgcacugcgcgcaggucuagccaggaag

SEQ ID NO: 329 - RNA, 20 nt, Artificial Sequence
  Synthetic
gcguagaagggcgucugccc

SEQ ID NO: 330 - RNA, 20 nt, Artificial Sequence
  Synthetic
cccagcgcccaccagucaca

SEQ ID NO: 331 - RNA, 20 nt, Artificial Sequence
  Synthetic
ccaucucggccggaauccgc

SEQ ID NO: 332 - DNA, 20 bp, Homo sapiens
gccaggctggttatgactca

SEQ ID NO: 333 - DNA, 16 bp, Homo sapiens
gcattctaatagcagc

SEQ ID NO: 334 - DNA, 16 bp, Homo sapiens
aggatatggaaccaaa

SEQ ID NO: 335 - DNA, 20 bp, Homo sapiens
agcatagttaacgagctccc

SEQ ID NO: 336 - DNA, 16 bp, Homo sapiens
acaataaataccgagg

SEQ ID NO: 337 - DNA, 20 bp, Homo sapiens
gcgcaccttcccgaatgtcc

SEQ ID NO: 338 - DNA, 16 bp, Homo sapiens
cccgaatgtccgacag

SEQ ID NO: 339 - DNA, 17 bp, Homo sapiens
cggagcggttgtgaact

SEQ ID NO: 340 - DNA, 17 bp, Homo sapiens
acaataaataccgagga

SEQ ID NO: 341 - DNA, 16 bp, Homo sapiens
gacaatctccgccagg

SEQ ID NO: 342 - DNA, 16 bp, Homo sapiens
tcccgaatgtccgaca

SEQ ID NO: 343 - DNA, 20 bp, Homo sapiens
cgacacctcgcccctcttca

SEQ ID NO: 344 - DNA, 20 bp, Homo sapiens
acgacacctcgcccctcttc

SEQ ID NO: 345 - DNA, 20 bp, Homo sapiens
cacgacacctcgcccctctt

SEQ ID NO: 346 - DNA, 20 bp, Homo sapiens
gcacgacacctcgcccctct

SEQ ID NO: 347 - DNA, 20 bp, Homo sapiens
agcacgacacctcgcccctc

SEQ ID NO: 348 - DNA, 20 bp, Homo sapiens
aagcacgacacctcgcccct

SEQ ID NO: 349 - DNA, 20 bp, Homo sapiens
gaagcacgacacctcgcccc

SEQ ID NO: 350 - DNA, 20 bp, Homo sapiens
ggaagcacgacacctcgccc

SEQ ID NO: 351 - DNA, 20 bp, Homo sapiens
cggaagcacgacacctcgcc

SEQ ID NO: 352 - DNA, 20 bp, Homo sapiens
acggaagcacgacacctcgc

SEQ ID NO: 353 - DNA, 20 bp, Homo sapiens
cacggaagcacgacacctcg

SEQ ID NO: 354 - DNA, 20 bp, Homo sapiens
tcacggaagcacgacacctc

SEQ ID NO: 355 - DNA, 20 bp, Homo sapiens
ctcacggaagcacgacacct

SEQ ID NO: 356 - DNA, 20 bp, Homo sapiens
cctcacggaagcacgacacc

SEQ ID NO: 357 - DNA, 20 bp, Homo sapiens
tcctcacggaagcacgacac

SEQ ID NO: 358 - DNA, 20 bp, Homo sapiens
ctcctcacggaagcacgaca

SEQ ID NO: 359 - DNA, 20 bp, Homo sapiens
tctcctcacggaagcacgac

SEQ ID NO: 360 - DNA, 20 bp, Homo sapiens
ctctcctcacggaagcacga

SEQ ID NO: 361 - DNA, 20 bp, Homo sapiens
cctctcctcacggaagcacg

SEQ ID NO: 362 - DNA, 20 bp, Homo sapiens
ccctctcctcacggaagcac

SEQ ID NO: 363 - DNA, 20 bp, Homo sapiens
tccctctcctcacggaagca

SEQ ID NO: 364 - DNA, 20 bp, Homo sapiens
gtccctctcctcacggaagc

SEQ ID NO: 365 - DNA, 20 bp, Homo sapiens
cgtccctctcctcacggaag

SEQ ID NO: 366 - DNA, 20 bp, Homo sapiens
ggtccccattcaccaacacg

SEQ ID NO: 367 - DNA, 20 bp, Homo sapiens
cggtccccattcaccaacac

SEQ ID NO: 368 - DNA, 20 bp, Homo sapiens
ccggtccccattcaccaaca

SEQ ID NO: 369 - DNA, 20 bp, Homo sapiens
gccggtccccattcaccaac

SEQ ID NO: 370 - DNA, 20 bp, Homo sapiens
cgccggtccccattcaccaa

SEQ ID NO: 371 - DNA, 20 bp, Homo sapiens
ccgccggtccccattcacca

SEQ ID NO: 372 - DNA, 20 bp, Homo sapiens
accgccggtccccattcacc

SEQ ID NO: 373 - DNA, 20 bp, Homo sapiens
caccgccggtccccattcac

SEQ ID NO: 374 - DNA, 20 bp, Homo sapiens
ccaccgccggtccccattca

SEQ ID NO: 375 - DNA, 20 bp, Homo sapiens
tccaccgccggtccccattc

SEQ ID NO: 376 - DNA, 20 bp, Homo sapiens
atccaccgccggtccccatt

SEQ ID NO: 377 - DNA, 20 bp, Homo sapiens
gatccaccgccggtccccat

SEQ ID NO: 378 - DNA, 20 bp, Homo sapiens
tgatccaccgccggtcccca

SEQ ID NO: 379 - DNA, 20 bp, Homo sapiens
gtgatccaccgccggtcccc

SEQ ID NO: 380 - DNA, 20 bp, Homo sapiens
cgtgatccaccgccggtccc

SEQ ID NO: 381 - DNA, 20 bp, Homo sapiens
ttctcatcctggaaggcgaa

SEQ ID NO: 382 - DNA, 20 bp, Homo sapiens
gttctcatcctggaaggcga

SEQ ID NO: 383 - DNA, 20 bp, Homo sapiens
agttctcatcctggaaggcg

SEQ ID NO: 384 - DNA, 20 bp, Homo sapiens
gtagttctcatcctggaagg

SEQ ID NO: 385 - DNA, 20 bp, Homo sapiens
ggtagttctcatcctggaag

SEQ ID NO: 386 - DNA, 20 bp, Homo sapiens
aggtagttctcatcctggaa

SEQ ID NO: 387 - DNA, 20 bp, Homo sapiens
caggtagttctcatcctgga

SEQ ID NO: 388 - DNA, 20 bp, Homo sapiens
tacaggtagttctcatcctg

SEQ ID NO: 389 - DNA, 20 bp, Homo sapiens
gtacaggtagttctcatcct

SEQ ID NO: 390 - DNA, 20 bp, Homo sapiens
ggtacaggtagttctcatcc

SEQ ID NO: 391 - DNA, 20 bp, Homo sapiens
aggtacaggtagttctcatc

SEQ ID NO: 392 - DNA, 20 bp, Homo sapiens
ccaggtacaggtagttctca

SEQ ID NO: 393 - DNA, 20 bp, Homo sapiens
accaggtacaggtagttctc

SEQ ID NO: 394 - DNA, 20 bp, Homo sapiens
gaccaggtacaggtagttct

SEQ ID NO: 395 - DNA, 20 bp, Homo sapiens
tgaccaggtacaggtagttc

SEQ ID NO: 396 - DNA, 20 bp, Homo sapiens
catgaccaggtacaggtagt

SEQ ID NO: 397 - DNA, 20 bp, Homo sapiens
ccatgaccaggtacaggtag

SEQ ID NO: 398 - DNA, 20 bp, Homo sapiens
tccatgaccaggtacaggta

SEQ ID NO: 399 - DNA, 20 bp, Homo sapiens
ctccatgaccaggtacaggt

SEQ ID NO: 400 - DNA, 20 bp, Homo sapiens
actccatgaccaggtacagg

SEQ ID NO: 401 - DNA, 20 bp, Homo sapiens
tactccatgaccaggtacag

SEQ ID NO: 402 - DNA, 20 bp, Homo sapiens
atactccatgaccaggtaca

SEQ ID NO: 403 - DNA, 20 bp, Homo sapiens
aatactccatgaccaggtac

SEQ ID NO: 404 - DNA, 20 bp, Homo sapiens
taatactccatgaccaggta

SEQ ID NO: 405 - DNA, 20 bp, Homo sapiens
cgtaatactccatgaccagg

SEQ ID NO: 406 - DNA, 20 bp, Homo sapiens
agcagtgtcagcaggtcccc

SEQ ID NO: 407 - DNA, 20 bp, Homo sapiens
cagcagtgtcagcaggtccc

SEQ ID NO: 408 - DNA, 20 bp, Homo sapiens
tcagcagtgtcagcaggtcc

SEQ ID NO: 409 - DNA, 20 bp, Homo sapiens
ctcagcagtgtcagcaggtc

SEQ ID NO: 410 - DNA, 20 bp, Homo sapiens
gctcagcagtgtcagcaggt

SEQ ID NO: 411 - DNA, 20 bp, Homo sapiens
tgctcagcagtgtcagcagg

SEQ ID NO: 412 - DNA, 20 bp, Homo sapiens
ttgctcagcagtgtcagcag

SEQ ID NO: 413 - DNA, 20 bp, Homo sapiens
cttgctcagcagtgtcagca

SEQ ID NO: 414 - DNA, 20 bp, Homo sapiens
acttgctcagcagtgtcagc

SEQ ID NO: 415 - DNA, 20 bp, Homo sapiens
aacttgctcagcagtgtcag

SEQ ID NO: 416 - DNA, 20 bp, Homo sapiens
aaacttgctcagcagtgtca

SEQ ID NO: 417 - DNA, 20 bp, Homo sapiens
caaacttgctcagcagtgtc

SEQ ID NO: 418 - DNA, 20 bp, Homo sapiens
ccaaacttgctcagcagtgt

SEQ ID NO: 419 - DNA, 20 bp, Homo sapiens
cccaaacttgctcagcagtg

SEQ ID NO: 420 - DNA, 20 bp, Homo sapiens
gtgagcccgtcctccaccaa

SEQ ID NO: 421 - DNA, 20 bp, Homo sapiens
agtgagcccgtcctccacca

SEQ ID NO: 422 - DNA, 20 bp, Homo sapiens
cagtgagcccgtcctccacc

SEQ ID NO: 423 - DNA, 20 bp, Homo sapiens
gcagtgagcccgtcctccac

SEQ ID NO: 424 - DNA, 20 bp, Homo sapiens
ggcagtgagcccgtcctcca

SEQ ID NO: 425 - DNA, 20 bp, Homo sapiens
tggcagtgagcccgtcctcc

SEQ ID NO: 426 - DNA, 20 bp, Homo sapiens
catggcagtgagcccgtcct

SEQ ID NO: 427 - DNA, 20 bp, Homo sapiens
ccatggcagtgagcccgtcc

SEQ ID NO: 428 - DNA, 20 bp, Homo sapiens
tccatggcagtgagcccgtc

SEQ ID NO: 429 - DNA, 20 bp, Homo sapiens
ctccatggcagtgagcccgt

SEQ ID NO: 430 - DNA, 20 bp, Homo sapiens
tctccatggcagtgagcccg

SEQ ID NO: 431 - DNA, 20 bp, Homo sapiens
gtctccatggcagtgagccc

SEQ ID NO: 432 - DNA, 20 bp, Homo sapiens
ccttcccgaatgtccgacag

SEQ ID NO: 433 - DNA, 20 bp, Homo sapiens
accttcccgaatgtccgaca

SEQ ID NO: 434 - DNA, 20 bp, Homo sapiens
caccttcccgaatgtccgac

SEQ ID NO: 435 - DNA, 20 bp, Homo sapiens
gcaccttcccgaatgtccga

SEQ ID NO: 436 - DNA, 20 bp, Homo sapiens
cgcaccttcccgaatgtccg

SEQ ID NO: 437 - DNA, 20 bp, Homo sapiens
ggcgcaccttcccgaatgtc

SEQ ID NO: 438 - DNA, 20 bp, Homo sapiens
acaaaaggcaggtggacccc

SEQ ID NO: 439 - DNA, 20 bp, Homo sapiens
cacaaaaggcaggtggaccc

SEQ ID NO: 440 - DNA, 20 bp, Homo sapiens
ccacaaaaggcaggtggacc

SEQ ID NO: 441 - DNA, 20 bp, Homo sapiens
cccacaaaaggcaggtggac

SEQ ID NO: 442 - DNA, 20 bp, Homo sapiens
gcccacaaaaggcaggtgga

SEQ ID NO: 443 - DNA, 20 bp, Homo sapiens
agcccacaaaaggcaggtgg

SEQ ID NO: 444 - DNA, 20 bp, Homo sapiens
tagcccacaaaaggcaggtg

SEQ ID NO: 445 - DNA, 20 bp, Homo sapiens
gtagcccacaaaaggcaggt

SEQ ID NO: 446 - DNA, 20 bp, Homo sapiens
agtagcccacaaaaggcagg

SEQ ID NO: 447 - DNA, 20 bp, Homo sapiens
gagtagcccacaaaaggcag

SEQ ID NO: 448 - DNA, 20 bp, Homo sapiens
ggagtagcccacaaaaggca

SEQ ID NO: 449 - DNA, 20 bp, Homo sapiens
aggagtagcccacaaaaggc

SEQ ID NO: 450 - DNA, 20 bp, Homo sapiens
taggagtagcccacaaaagg

SEQ ID NO: 451 - DNA, 20 bp, Homo sapiens
gtaggagtagcccacaaaag

SEQ ID NO: 452 - DNA, 20 bp, Homo sapiens
agtaggagtagcccacaaaa

SEQ ID NO: 453 - DNA, 20 bp, Homo sapiens
gagtaggagtagcccacaaa

SEQ ID NO: 454 - DNA, 20 bp, Homo sapiens
ggagtaggagtagcccacaa

SEQ ID NO: 455 - DNA, 20 bp, Homo sapiens
aggagtaggagtagcccaca

SEQ ID NO: 456 - DNA, 20 bp, Homo sapiens
caggagtaggagtagcccac

SEQ ID NO: 457 - DNA, 20 bp, Homo sapiens
gcaggagtaggagtagccca

SEQ ID NO: 458 - DNA, 20 bp, Homo sapiens
tgcaggagtaggagtagccc

SEQ ID NO: 459 - DNA, 20 bp, Homo sapiens
atgcaggagtaggagtagcc

SEQ ID NO: 460 - DNA, 20 bp, Homo sapiens
catgcaggagtaggagtagc

SEQ ID NO: 461 - DNA, 20 bp, Homo sapiens
ccatgcaggagtaggagtag

SEQ ID NO: 462 - DNA, 20 bp, Homo sapiens
gccatgcaggagtaggagta

SEQ ID NO: 463 - DNA, 20 bp, Homo sapiens
ggccatgcaggagtaggagt

SEQ ID NO: 464 - DNA, 20 bp, Homo sapiens
gggccatgcaggagtaggag

SEQ ID NO: 465 - DNA, 20 bp, Homo sapiens
agggccatgcaggagtagga

SEQ ID NO: 466 - DNA, 20 bp, Homo sapiens
gagggccatgcaggagtagg

SEQ ID NO: 467 - DNA, 20 bp, Homo sapiens
ctgagggccatgcaggagta

SEQ ID NO: 468 - DNA, 20 bp, Homo sapiens
cctgagggccatgcaggagt

SEQ ID NO: 469 - DNA, 20 bp, Homo sapiens
ccctgagggccatgcaggag

SEQ ID NO: 470 - DNA, 20 bp, Homo sapiens
tccctgagggccatgcagga

SEQ ID NO: 471 - DNA, 20 bp, Homo sapiens
gtccctgagggccatgcagg

SEQ ID NO: 472 - DNA, 20 bp, Homo sapiens
tgtccctgagggccatgcag

SEQ ID NO: 473 - DNA, 20 bp, Homo sapiens
ctgtccctgagggccatgca

SEQ ID NO: 474 - DNA, 20 bp, Homo sapiens
actgtccctgagggccatgc

SEQ ID NO: 475 - DNA, 20 bp, Homo sapiens
cactgtccctgagggccatg

SEQ ID NO: 476 - DNA, 20 bp, Homo sapiens
tcactgtccctgagggccat

SEQ ID NO: 477 - DNA, 20 bp, Homo sapiens
ctcactgtccctgagggcca

SEQ ID NO: 478 - DNA, 20 bp, Homo sapiens
cctcactgtccctgagggcc

SEQ ID NO: 479 - DNA, 20 bp, Homo sapiens
acctcactgtccctgagggc

SEQ ID NO: 480 - DNA, 20 bp, Homo sapiens
gacctcactgtccctgaggg

SEQ ID NO: 481 - DNA, 20 bp, Homo sapiens
ggacctcactgtccctgagg

SEQ ID NO: 482 - DNA, 20 bp, Homo sapiens
gggacctcactgtccctgag

SEQ ID NO: 483 - DNA, 20 bp, Homo sapiens
cctccagttccatgggtgtg

SEQ ID NO: 484 - DNA, 20 bp, Homo sapiens
gcctccagttccatgggtgt

SEQ ID NO: 485 - DNA, 20 bp, Homo sapiens
ggcctccagttccatgggtg

SEQ ID NO: 486 - DNA, 20 bp, Homo sapiens
cggcctccagttccatgggt

SEQ ID NO: 487 - DNA, 20 bp, Homo sapiens
tcggcctccagttccatggg

SEQ ID NO: 488 - DNA, 20 bp, Homo sapiens
ctcggcctccagttccatgg

SEQ ID NO: 489 - DNA, 20 bp, Homo sapiens
gctcggcctccagttccatg

SEQ ID NO: 490 - DNA, 20 bp, Homo sapiens
tgctcggcctccagttccat

SEQ ID NO: 491 - DNA, 20 bp, Homo sapiens
ctgctcggcctccagttcca

SEQ ID NO: 492 - DNA, 20 bp, Homo sapiens
gctgctcggcctccagttcc

SEQ ID NO: 493 - DNA, 20 bp, Homo sapiens
agctgctcggcctccagttc

SEQ ID NO: 494 - DNA, 20 bp, Homo sapiens
cagctgctcggcctccagtt

SEQ ID NO: 495 - DNA, 20 bp, Homo sapiens
gcagctgctcggcctccagt

SEQ ID NO: 496 - DNA, 20 bp, Homo sapiens
agcagctgctcggcctccag

SEQ ID NO: 497 - DNA, 20 bp, Homo sapiens
aagcagctgctcggcctcca

SEQ ID NO: 498 - DNA, 20 bp, Homo sapiens
caagcagctgctcggcctcc

SEQ ID NO: 499 - DNA, 20 bp, Homo sapiens
tcaagcagctgctcggcctc

SEQ ID NO: 500 - DNA, 20 bp, Homo sapiens
ctcaagcagctgctcggcct

SEQ ID NO: 501 - DNA, 20 bp, Homo sapiens
gctcaagcagctgctcggcc

SEQ ID NO: 502 - DNA, 20 bp, Homo sapiens
ggctcaagcagctgctcggc

SEQ ID NO: 503 - DNA, 20 bp, Homo sapiens
tggctcaagcagctgctcgg

SEQ ID NO: 504 - DNA, 20 bp, Homo sapiens
gtggctcaagcagctgctcg

SEQ ID NO: 505 - DNA, 20 bp, Homo sapiens
tgtggctcaagcagctgctc

SEQ ID NO: 506 - DNA, 20 bp, Homo sapiens
gtgtggctcaagcagctgct

SEQ ID NO: 507 - DNA, 20 bp, Homo sapiens
ccacttcagctgtttcatcc

SEQ ID NO: 508 - DNA, 20 bp, Homo sapiens
tgccacttcagctgtttcat

SEQ ID NO: 509 - DNA, 20 bp, Homo sapiens
ctgccacttcagctgtttca

SEQ ID NO: 510 - DNA, 20 bp, Homo sapiens
actgccacttcagctgtttc

SEQ ID NO: 511 - DNA, 20 bp, Homo sapiens
aactgccacttcagctgttt

SEQ ID NO: 512 - DNA, 20 bp, Homo sapiens
gaactgccacttcagctgtt

SEQ ID NO: 513 - DNA, 20 bp, Homo sapiens
ggaactgccacttcagctgt

SEQ ID NO: 514 - DNA, 20 bp, Homo sapiens
tggaactgccacttcagctg

SEQ ID NO: 515 - DNA, 20 bp, Homo sapiens
ctggaactgccacttcagct

SEQ ID NO: 516 - DNA, 20 bp, Homo sapiens
gctggaactgccacttcagc

SEQ ID NO: 517 - DNA, 20 bp, Homo sapiens
cgctggaactgccacttcag

SEQ ID NO: 518 - DNA, 20 bp, Homo sapiens
ccgctggaactgccacttca

SEQ ID NO: 519 - DNA, 20 bp, Homo sapiens
gccgctggaactgccacttc

SEQ ID NO: 520 - DNA, 20 bp, Homo sapiens
agccgctggaactgccactt

SEQ ID NO: 521 - DNA, 20 bp, Homo sapiens
ctcagcctctgccgcaggga

SEQ ID NO: 522 - DNA, 20 bp, Homo sapiens
cctcagcctctgccgcaggg

SEQ ID NO: 523 - DNA, 20 bp, Homo sapiens
ggcctcagcctctgccgcag

SEQ ID NO: 524 - DNA, 20 bp, Homo sapiens
cggcctcagcctctgccgca

SEQ ID NO: 525 - DNA, 20 bp, Homo sapiens
tcggcctcagcctctgccgc

SEQ ID NO: 526 - DNA, 20 bp, Homo sapiens
ctcggcctcagcctctgccg

SEQ ID NO: 527 - DNA, 20 bp, Homo sapiens
cctcggcctcagcctctgcc

SEQ ID NO: 528 - DNA, 20 bp, Homo sapiens
acctcggcctcagcctctgc

SEQ ID NO: 529 - DNA, 20 bp, Homo sapiens
cacctcggcctcagcctctg

SEQ ID NO: 530 - DNA, 20 bp, Homo sapiens
tcacctcggcctcagcctct

SEQ ID NO: 531 - DNA, 20 bp, Homo sapiens
gtcacctcggcctcagcctc

SEQ ID NO: 532 - DNA, 20 bp, Homo sapiens
cgtcacctcggcctcagcct

SEQ ID NO: 533 - DNA, 20 bp, Homo sapiens
agcacctcctcctccagggc

SEQ ID NO: 534 - DNA, 20 bp, Homo sapiens
gagcacctcctcctccaggg

SEQ ID NO: 535 - DNA, 20 bp, Homo sapiens
tgagcacctcctcctccagg

SEQ ID NO: 536 - DNA, 20 bp, Homo sapiens
gtgagcacctcctcctccag

SEQ ID NO: 537 - DNA, 20 bp, Homo sapiens
ggtgagcacctcctcctcca

SEQ ID NO: 538 - DNA, 20 bp, Homo sapiens
gggtgagcacctcctcctcc

SEQ ID NO: 539 - DNA, 20 bp, Homo sapiens
cgggtgagcacctcctcctc

SEQ ID NO: 540 - DNA, 20 bp, Homo sapiens
ccgggtgagcacctcctcct

SEQ ID NO: 541 - DNA, 20 bp, Homo sapiens
gccgggtgagcacctcctcc

SEQ ID NO: 542 - DNA, 20 bp, Homo sapiens
tgccgggtgagcacctcctc

SEQ ID NO: 543 - DNA, 20 bp, Homo sapiens
ctgccgggtgagcacctcct

SEQ ID NO: 544 - DNA, 20 bp, Homo sapiens
tctgccgggtgagcacctcc

SEQ ID NO: 545 - DNA, 20 bp, Homo sapiens
gctctgccgggtgagcacct

SEQ ID NO: 546 - DNA, 20 bp, Homo sapiens
ggctctgccgggtgagcacc

SEQ ID NO: 547 - DNA, 20 bp, Homo sapiens
aggctctgccgggtgagcac

SEQ ID NO: 548 - DNA, 20 bp, Homo sapiens
caggctctgccgggtgagca

SEQ ID NO: 549 - DNA, 20 bp, Homo sapiens
tcaggctctgccgggtgagc

SEQ ID NO: 550 - DNA, 20 bp, Homo sapiens
gctcaggctctgccgggtga

SEQ ID NO: 551 - DNA, 20 bp, Homo sapiens
cggctcaggctctgccgggt

SEQ ID NO: 552 - DNA, 20 bp, Homo sapiens
ccggctcaggctctgccggg

SEQ ID NO: 553 - DNA, 20 bp, Homo sapiens
cccggctcaggctctgccgg

SEQ ID NO: 554 - DNA, 20 bp, Homo sapiens
tcccggctcaggctctgccg

SEQ ID NO: 555 - DNA, 20 bp, Homo sapiens
ctcccggctcaggctctgcc

SEQ ID NO: 556 - DNA, 20 bp, Homo sapiens
tctcccggctcaggctctgc

SEQ ID NO: 557 - DNA, 20 bp, Homo sapiens
atctcccggctcaggctctg

SEQ ID NO: 558 - DNA, 20 bp, Homo sapiens
catctcccggctcaggctct

SEQ ID NO: 559 - DNA, 20 bp, Homo sapiens
ccatctcccggctcaggctc

SEQ ID NO: 560 - DNA, 20 bp, Homo sapiens
tccatctcccggctcaggct

SEQ ID NO: 561 - DNA, 20 bp, Homo sapiens
ctccatctcccggctcaggc

SEQ ID NO: 562 - DNA, 20 bp, Homo sapiens
cctccatctcccggctcagg

SEQ ID NO: 563 - DNA, 20 bp, Homo sapiens
gcctccatctcccggctcag

SEQ ID NO: 564 - DNA, 20 bp, Homo sapiens
ggcctccatctcccggctca

SEQ ID NO: 565 - DNA, 20 bp, Homo sapiens
tggcctccatctcccggctc

SEQ ID NO: 566 - DNA, 20 bp, Homo sapiens
atggcctccatctcccggct

SEQ ID NO: 567 - DNA, 20 bp, Homo sapiens
gatggcctccatctcccggc

SEQ ID NO: 568 - DNA, 20 bp, Homo sapiens
ggatggcctccatctcccgg

SEQ ID NO: 569 - DNA, 20 bp, Homo sapiens
cggatggcctccatctcccg

SEQ ID NO: 570 - DNA, 20 bp, Homo sapiens
gcggatggcctccatctccc

SEQ ID NO: 571 - DNA, 20 bp, Homo sapiens
tgcggatggcctccatctcc

SEQ ID NO: 572 - DNA, 20 bp, Homo sapiens
gttccgagcctctgcctcgc

SEQ ID NO: 573 - DNA, 20 bp, Homo sapiens
agggcctcagcctggccgaa

SEQ ID NO: 574 - DNA, 20 bp, Homo sapiens
cagggcctcagcctggccga

SEQ ID NO: 575 - DNA, 20 bp, Homo sapiens
gtcagggcctcagcctggcc

SEQ ID NO: 576 - DNA, 20 bp, Homo sapiens
cgtcagggcctcagcctggc

SEQ ID NO: 577 - DNA, 20 bp, Homo sapiens
agcaaatttcccgagtaagc

SEQ ID NO: 578 - DNA, 20 bp, Homo sapiens
aagcaaatttcccgagtaag

SEQ ID NO: 579 - DNA, 20 bp, Homo sapiens
aaaagcaaatttcccgagta

SEQ ID NO: 580 - DNA, 20 bp, Homo sapiens
caaaagcaaatttcccgagt

SEQ ID NO: 581 - DNA, 20 bp, Homo sapiens
gcaaaagcaaatttcccgag

SEQ ID NO: 582 - DNA, 20 bp, Homo sapiens
ggcaaaagcaaatttcccga

SEQ ID NO: 583 - DNA, 20 bp, Homo sapiens
tggcaaaagcaaatttcccg

SEQ ID NO: 584 - DNA, 20 bp, Homo sapiens
tttggcaaaagcaaatttcc

SEQ ID NO: 585 - DNA, 20 bp, Homo sapiens
gtttggcaaaagcaaatttc

SEQ ID NO: 586 - DNA, 20 bp, Homo sapiens
gggtttggcaaaagcaaatt

SEQ ID NO: 587 - DNA, 20 bp, Homo sapiens
cgggtttggcaaaagcaaat

SEQ ID NO: 588 - DNA, 20 bp, Homo sapiens
aagcgggtttggcaaaagca

SEQ ID NO: 589 - DNA, 20 bp, Homo sapiens
aatatccaaaccgccgaagc

SEQ ID NO: 590 - DNA, 20 bp, Homo sapiens
aaatatccaaaccgccgaag

SEQ ID NO: 591 - DNA, 20 bp, Homo sapiens
ataaatatccaaaccgccga

SEQ ID NO: 592 - DNA, 20 bp, Homo sapiens
aataaatatccaaaccgccg

SEQ ID NO: 593 - DNA, 20 bp, Homo sapiens
tcaataaatatccaaaccgc

SEQ ID NO: 594 - DNA, 20 bp, Homo sapiens
gtcaataaatatccaaaccg

SEQ ID NO: 595 - DNA, 20 bp, Homo sapiens
ggtcaataaatatccaaacc

SEQ ID NO: 596 - DNA, 20 bp, Homo sapiens
aggtcaataaatatccaaac

SEQ ID NO: 597 - DNA, 20 bp, Homo sapiens
gaggtcaataaatatccaaa

SEQ ID NO: 598 - DNA, 20 bp, Homo sapiens
acgaggtcaataaatatcca

SEQ ID NO: 599 - DNA, 20 bp, Homo sapiens
gacgaggtcaataaatatcc

SEQ ID NO: 600 - DNA, 20 bp, Homo sapiens
aggacgaggtcaataaatat

SEQ ID NO: 601 - DNA, 20 bp, Homo sapiens
gaggacgaggtcaataaata

SEQ ID NO: 602 - DNA, 20 bp, Homo sapiens
cggaggacgaggtcaataaa

SEQ ID NO: 603 - DNA, 20 bp, Homo sapiens
tcggaggacgaggtcaataa

SEQ ID NO: 604 - DNA, 20 bp, Homo sapiens
agtcggaggacgaggtcaat

SEQ ID NO: 605 - DNA, 20 bp, Homo sapiens
gagtcggaggacgaggtcaa

SEQ ID NO: 606 - DNA, 20 bp, Homo sapiens
gcgagtcggaggacgaggtc

SEQ ID NO: 607 - DNA, 20 bp, Homo sapiens
agcgagtcggaggacgaggt

SEQ ID NO: 608 - DNA, 20 bp, Homo sapiens
cagcgagtcggaggacgagg

SEQ ID NO: 609 - DNA, 20 bp, Homo sapiens
tcagcgagtcggaggacgag

SEQ ID NO: 610 - DNA, 20 bp, Homo sapiens
gtcagcgagtcggaggacga

SEQ ID NO: 611 - DNA, 20 bp, Homo sapiens
ctgtcagcgagtcggaggac

SEQ ID NO: 612 - DNA, 20 bp, Homo sapiens
cctgtcagcgagtcggagga

SEQ ID NO: 613 - DNA, 20 bp, Homo sapiens
agcctgtcagcgagtcggag

SEQ ID NO: 614 - DNA, 20 bp, Homo sapiens
gtctcagtgcatccaaaacg

SEQ ID NO: 615 - DNA, 20 bp, Homo sapiens
ggtctcagtgcatccaaaac

SEQ ID NO: 616 - DNA, 20 bp, Homo sapiens
gggtctcagtgcatccaaaa

SEQ ID NO: 617 - DNA, 20 bp, Homo sapiens
ggagggccttttattcgcga

SEQ ID NO: 618 - DNA, 20 bp, Homo sapiens
tggagggccttttattcgcg

SEQ ID NO: 619 - DNA, 20 bp, Homo sapiens
atggagggccttttattcgc

SEQ ID NO: 620 - DNA, 20 bp, Homo sapiens
gatggagggccttttattcg

SEQ ID NO: 621 - DNA, 20 bp, Homo sapiens
agatggagggccttttattc

SEQ ID NO: 622 - DNA, 20 bp, Homo sapiens
cagatggagggccttttatt

SEQ ID NO: 623 - DNA, 20 bp, Homo sapiens
gcagatggagggccttttat

SEQ ID NO: 624 - DNA, 16 bp, Homo sapiens
tctcctcacggaagca

SEQ ID NO: 625 - DNA, 16 bp, Homo sapiens
ctctcctcacggaagc

SEQ ID NO: 626 - DNA, 16 bp, Homo sapiens
cctctcctcacggaag

SEQ ID NO: 627 - DNA, 16 bp, Homo sapiens
aaacttgctcagcagt

SEQ ID NO: 628 - DNA, 16 bp, Homo sapiens
caaacttgctcagcag

SEQ ID NO: 629 - DNA, 16 bp, Homo sapiens
ccaaacttgctcagca

SEQ ID NO: 630 - DNA, 16 bp, Homo sapiens
cccaaacttgctcagc

SEQ ID NO: 631 - DNA, 16 bp, Homo sapiens
tccccaaacttgctca

SEQ ID NO: 632 - DNA, 16 bp, Homo sapiens
gtttgatgtccctgtg

SEQ ID NO: 633 - DNA, 16 bp, Homo sapiens
ggtttgatgtccctgt

SEQ ID NO: 634 - DNA, 16 bp, Homo sapiens
gggtttgatgtccctg

SEQ ID NO: 635 - DNA, 16 bp, Homo sapiens
acagcctgcaggatct

SEQ ID NO: 636 - DNA, 16 bp, Homo sapiens
cacagcctgcaggatc

SEQ ID NO: 637 - DNA, 16 bp, Homo sapiens
ccacagcctgcaggat

SEQ ID NO: 638 - DNA, 16 bp, Homo sapiens
cccacagcctgcagga

SEQ ID NO: 639 - DNA, 16 bp, Homo sapiens
caccgcccacagcctg

SEQ ID NO: 640 - DNA, 16 bp, Homo sapiens
ccaccgcccacagcct

SEQ ID NO: 641 - DNA, 16 bp, Homo sapiens
cccaccgcccacagcc

SEQ ID NO: 642 - DNA, 16 bp, Homo sapiens
gcccaccgcccacagc

SEQ ID NO: 643 - DNA, 16 bp, Homo sapiens
ccaggcccaccgccca

SEQ ID NO: 644 - DNA, 16 bp, Homo sapiens
tcccaggcccaccgcc

SEQ ID NO: 645 - DNA, 16 bp, Homo sapiens
ggtggcaccttcgaaa

SEQ ID NO: 646 - DNA, 16 bp, Homo sapiens
cggtggcaccttcgaa

SEQ ID NO: 647 - DNA, 16 bp, Homo sapiens
tcggtggcaccttcga

SEQ ID NO: 648 - DNA, 16 bp, Homo sapiens
agtgagcccgtcctcc

SEQ ID NO: 649 - DNA, 16 bp, Homo sapiens
cagtgagcccgtcctc

SEQ ID NO: 650 - DNA, 16 bp, Homo sapiens
gcagtgagcccgtcct

SEQ ID NO: 651 - DNA, 16 bp, Homo sapiens
ttcccgaatgtccgac

SEQ ID NO: 652 - DNA, 16 bp, Homo sapiens
cttcccgaatgtccga

SEQ ID NO: 653 - DNA, 16 bp, Homo sapiens
ccttcccgaatgtccg

SEQ ID NO: 654 - DNA, 16 bp, Homo sapiens
accttcccgaatgtcc

SEQ ID NO: 655 - DNA, 16 bp, Homo sapiens
caccttcccgaatgtc

SEQ ID NO: 656 - DNA, 16 bp, Homo sapiens
gcaccttcccgaatgt

SEQ ID NO: 657 - DNA, 16 bp, Homo sapiens
cgcaccttcccgaatg

SEQ ID NO: 658 - DNA, 16 bp, Homo sapiens
atccgctcctgcaact

SEQ ID NO: 659 - DNA, 16 bp, Homo sapiens
catccgctcctgcaac

SEQ ID NO: 660 - DNA, 16 bp, Homo sapiens
ccatccgctcctgcaa

SEQ ID NO: 661 - DNA, 16 bp, Homo sapiens
aggtggatccgtggcc

SEQ ID NO: 662 - DNA, 16 bp, Homo sapiens
gggaaggtggatccgt

SEQ ID NO: 663 - DNA, 16 bp, Homo sapiens
acaggagcagggaaag

SEQ ID NO: 664 - DNA, 16 bp, Homo sapiens
cagactgcggtgagtt

SEQ ID NO: 665 - DNA, 16 bp, Homo sapiens
ggctcctgggcggcgc

SEQ ID NO: 666 - DNA, 16 bp, Homo sapiens
ggcggctcctgggcgg

SEQ ID NO: 667 - DNA, 16 bp, Homo sapiens
cgcgggcggctcctgg

SEQ ID NO: 668 - DNA, 16 bp, Homo sapiens
gagcgcgggcggctcc

SEQ ID NO: 669 - DNA, 16 bp, Homo sapiens
ggttcagggagcgcgg

SEQ ID NO: 670 - DNA, 16 bp, Homo sapiens
agttctagggttcagg

SEQ ID NO: 671 - DNA, 16 bp, Homo sapiens
gacagttctagggttc

SEQ ID NO: 672 - DNA, 16 bp, Homo sapiens
agacagttctagggtt

SEQ ID NO: 673 - DNA, 16 bp, Homo sapiens
aagacagttctagggt

SEQ ID NO: 674 - DNA, 16 bp, Homo sapiens
gaagacagttctaggg

SEQ ID NO: 675 - DNA, 16 bp, Homo sapiens
cgaagacagttctagg

SEQ ID NO: 676 - DNA, 16 bp, Homo sapiens
tcgaagacagttctag

SEQ ID NO: 677 - DNA, 16 bp, Homo sapiens
gtcgaagacagttcta

SEQ ID NO: 678 - DNA, 16 bp, Homo sapiens
agtcgaagacagttct

SEQ ID NO: 679 - DNA, 16 bp, Homo sapiens
gagtcgaagacagttc

SEQ ID NO: 680 - DNA, 16 bp, Homo sapiens
ggagtcgaagacagtt

SEQ ID NO: 681 - DNA, 16 bp, Homo sapiens
cggagtcgaagacagt

SEQ ID NO: 682 - DNA, 16 bp, Homo sapiens
ccggagtcgaagacag

SEQ ID NO: 683 - DNA, 16 bp, Homo sapiens
cccggagtcgaagaca

SEQ ID NO: 684 - DNA, 16 bp, Homo sapiens
ccccggagtcgaagac

SEQ ID NO: 685 - DNA, 16 bp, Homo sapiens
gccccggagtcgaaga

SEQ ID NO: 686 - DNA, 16 bp, Homo sapiens
ggccccggagtcgaag

SEQ ID NO: 687 - DNA, 16 bp, Homo sapiens
gggccccggagtcgaa

SEQ ID NO: 688 - DNA, 16 bp, Homo sapiens
cggttgtgaactggca

SEQ ID NO: 689 - DNA, 16 bp, Homo sapiens
agcggttgtgaactgg

SEQ ID NO: 690 - DNA, 16 bp, Homo sapiens
tgcactttgcgaacca

SEQ ID NO: 691 - DNA, 16 bp, Homo sapiens
actttgcgaaccaacg

SEQ ID NO: 692 - DNA, 16 bp, Homo sapiens
aaagctttgcactttg

SEQ ID NO: 693 - DNA, 16 bp, Homo sapiens
tcccgagtaagcaggc

SEQ ID NO: 694 - DNA, 16 bp, Homo sapiens
gcagcgcaagtgagga

SEQ ID NO: 695 - DNA, 16 bp, Homo sapiens
gtcagcgagtcggagg

SEQ ID NO: 696 - DNA, 16 bp, Homo sapiens
cctgtcagcgagtcgg

SEQ ID NO: 697 - DNA, 16 bp, Homo sapiens
gcctgtcagcgagtcg

SEQ ID NO: 698 - DNA, 16 bp, Homo sapiens
gggtctcagtgcatcc

SEQ ID NO: 699 - DNA, 16 bp, Homo sapiens
aggtttttccagaggc

SEQ ID NO: 700 - DNA, 16 bp, Homo sapiens
aaggtttttccagagg

SEQ ID NO: 701 - DNA, 16 bp, Homo sapiens
ggtcactgctgggtcc

SEQ ID NO: 702 - DNA, 16 bp, Homo sapiens
gtggtttctgtctgct

SEQ ID NO: 703 - DNA, 16 bp, Homo sapiens
gaactggcaggcggtg

SEQ ID NO: 704 - DNA, 16 bp, Homo sapiens
tgtgaactggcaggcg

SEQ ID NO: 705 - DNA, 16 bp, Homo sapiens
actggagctgggcgga

SEQ ID NO: 706 - DNA, 16 bp, Homo sapiens
aggactggagctgggc

SEQ ID NO: 707 - DNA, 16 bp, Homo sapiens
tcacaggactggagct

SEQ ID NO: 708 - DNA, 16 bp, Homo sapiens
atcacaggactggagc

SEQ ID NO: 709 - DNA, 16 bp, Homo sapiens
ggatcacaggactgga

SEQ ID NO: 710 - DNA, 16 bp, Homo sapiens
ctcagcctggccgaaa

SEQ ID NO: 711 - DNA, 16 bp, Homo sapiens
gtcagggcctcagcct

SEQ ID NO: 712 - DNA, 16 bp, Homo sapiens
cgtcagggcctcagcc

SEQ ID NO: 713 - DNA, 16 bp, Homo sapiens
tttgcactttgcgaac

SEQ ID NO: 714 - DNA, 16 bp, Homo sapiens
aatttcccgagtaagc

SEQ ID NO: 715 - DNA, 16 bp, Homo sapiens
gcaaatttcccgagta

SEQ ID NO: 716 - DNA, 16 bp, Homo sapiens
agcaaatttcccgagt

SEQ ID NO: 717 - DNA, 16 bp, Homo sapiens
aagcaaatttcccgag

SEQ ID NO: 718 - DNA, 16 bp, Homo sapiens
aaagcaaatttcccga

SEQ ID NO: 719 - DNA, 16 bp, Homo sapiens
aaaagcaaatttcccg

SEQ ID NO: 720 - DNA, 16 bp, Homo sapiens
ggcaaaagcaaatttc

SEQ ID NO: 721 - DNA, 16 bp, Homo sapiens
gtttggcaaaagcaaa

SEQ ID NO: 722 - DNA, 16 bp, Homo sapiens
ggtttggcaaaagcaa

SEQ ID NO: 723 - DNA, 16 bp, Homo sapiens
gggtttggcaaaagca

SEQ ID NO: 724 - DNA, 16 bp, Homo sapiens
gcgggtttggcaaaag

SEQ ID NO: 725 - DNA, 16 bp, Homo sapiens
agcgggtttggcaaaa

SEQ ID NO: 726 - DNA, 16 bp, Homo sapiens
aagcgggtttggcaaa

SEQ ID NO: 727 - DNA, 16 bp, Homo sapiens
ggctccgagagcagcg

SEQ ID NO: 728 - DNA, 16 bp, Homo sapiens
taaatatccaaaccgc

SEQ ID NO: 729 - DNA, 16 bp, Homo sapiens
gtcaataaatatccaa

SEQ ID NO: 730 - DNA, 16 bp, Homo sapiens
aggtcaataaatatcc

SEQ ID NO: 731 - DNA, 16 bp, Homo sapiens
cgaggtcaataaatat

SEQ ID NO: 732 - DNA, 16 bp, Homo sapiens
acgaggtcaataaata

SEQ ID NO: 733 - DNA, 16 bp, Homo sapiens
gacgaggtcaataaat

SEQ ID NO: 734 - DNA, 16 bp, Homo sapiens
ggacgaggtcaataaa

SEQ ID NO: 735 - DNA, 16 bp, Homo sapiens
aggacgaggtcaataa

SEQ ID NO: 736 - DNA, 16 bp, Homo sapiens
gaggacgaggtcaata

SEQ ID NO: 737 - DNA, 16 bp, Homo sapiens
tcggaggacgaggtca

SEQ ID NO: 738 - DNA, 16 bp, Homo sapiens
gtcggaggacgaggtc

SEQ ID NO: 739 - DNA, 16 bp, Homo sapiens
agtcggaggacgaggt

SEQ ID NO: 740 - DNA, 16 bp, Homo sapiens
gagtcggaggacgagg

SEQ ID NO: 741 - DNA, 16 bp, Homo sapiens
cgagtcggaggacgag

SEQ ID NO: 742 - DNA, 16 bp, Homo sapiens
agcgagtcggaggacg

SEQ ID NO: 743 - DNA, 16 bp, Homo sapiens
cagcgagtcggaggac

SEQ ID NO: 744 - DNA, 16 bp, Homo sapiens
tcagcgagtcggagga

SEQ ID NO: 745 - DNA, 16 bp, Homo sapiens
tgtcagcgagtcggag

SEQ ID NO: 746 - DNA, 16 bp, Homo sapiens
ctgtcagcgagtcgga

SEQ ID NO: 747 - DNA, 16 bp, Homo sapiens
cagtgcatccaaaacg

SEQ ID NO: 748 - DNA, 16 bp, Homo sapiens
tctcagtgcatccaaa

SEQ ID NO: 749 - DNA, 16 bp, Homo sapiens
gtctcagtgcatccaa

SEQ ID NO: 750 - DNA, 16 bp, Homo sapiens
caataaataccgagga

SEQ ID NO: 751 - DNA, 16 bp, Homo sapiens
agacaataaataccga

SEQ ID NO: 752 - DNA, 16 bp, Homo sapiens
cagacaataaataccg

SEQ ID NO: 753 - DNA, 16 bp, Homo sapiens
cacggaagcacgacac

SEQ ID NO: 754 - DNA, 16 bp, Homo sapiens
tcacggaagcacgaca

SEQ ID NO: 755 - DNA, 16 bp, Homo sapiens
ctcacggaagcacgac

SEQ ID NO: 756 - DNA, 16 bp, Homo sapiens
gtccctctcctcacgg

SEQ ID NO: 757 - DNA, 16 bp, Homo sapiens
cgtccctctcctcacg

SEQ ID NO: 758 - DNA, 16 bp, Homo sapiens
cccattcaccaacacg

SEQ ID NO: 759 - DNA, 16 bp, Homo sapiens
ccccattcaccaacac

SEQ ID NO: 760 - DNA, 16 bp, Homo sapiens
tccccattcaccaaca

SEQ ID NO: 761 - DNA, 16 bp, Homo sapiens
gtccccattcaccaac

SEQ ID NO: 762 - DNA, 16 bp, Homo sapiens
ggtccccattcaccaa

SEQ ID NO: 763 - DNA, 16 bp, Homo sapiens
cggtccccattcacca

SEQ ID NO: 764 - DNA, 16 bp, Homo sapiens
ccggtccccattcacc

SEQ ID NO: 765 - DNA, 16 bp, Homo sapiens
gccggtccccattcac

SEQ ID NO: 766 - DNA, 16 bp, Homo sapiens
cgccggtccccattca

SEQ ID NO: 767 - DNA, 16 bp, Homo sapiens
ccgccggtccccattc

SEQ ID NO: 768 - DNA, 16 bp, Homo sapiens
accgccggtccccatt

SEQ ID NO: 769 - DNA, 16 bp, Homo sapiens
caccgccggtccccat

SEQ ID NO: 770 - DNA, 16 bp, Homo sapiens
ccaccgccggtcccca

SEQ ID NO: 771 - DNA, 16 bp, Homo sapiens
tccaccgccggtcccc

SEQ ID NO: 772 - DNA, 16 bp, Homo sapiens
atccaccgccggtccc

SEQ ID NO: 773 - DNA, 16 bp, Homo sapiens
gatccaccgccggtcc

SEQ ID NO: 774 - DNA, 16 bp, Homo sapiens
tgatccaccgccggtc

SEQ ID NO: 775 - DNA, 16 bp, Homo sapiens
gtgatccaccgccggt

SEQ ID NO: 776 - DNA, 16 bp, Homo sapiens
cgtgatccaccgccgg

SEQ ID NO: 777 - DNA, 16 bp, Homo sapiens
catcctggaaggcgaa

SEQ ID NO: 778 - DNA, 16 bp, Homo sapiens
tcatcctggaaggcga

SEQ ID NO: 779 - DNA, 16 bp, Homo sapiens
agttctcatcctggaa

SEQ ID NO: 780 - DNA, 16 bp, Homo sapiens
tagttctcatcctgga

SEQ ID NO: 781 - DNA, 16 bp, Homo sapiens
gtagttctcatcctgg

SEQ ID NO: 782 - DNA, 16 bp, Homo sapiens
caggtacaggtagttc

SEQ ID NO: 783 - DNA, 16 bp, Homo sapiens
ccaggtacaggtagtt

SEQ ID NO: 784 - DNA, 16 bp, Homo sapiens
gaccaggtacaggtag

SEQ ID NO: 785 - DNA, 16 bp, Homo sapiens
ctccatgaccaggtac

SEQ ID NO: 786 - DNA, 16 bp, Homo sapiens
actccatgaccaggta

SEQ ID NO: 787 - DNA, 16 bp, Homo sapiens
tactccatgaccaggt

SEQ ID NO: 788 - DNA, 16 bp, Homo sapiens
aatactccatgaccag

SEQ ID NO: 789 - DNA, 16 bp, Homo sapiens
taatactccatgacca

SEQ ID NO: 790 - DNA, 16 bp, Homo sapiens
gtaatactccatgacc

SEQ ID NO: 791 - DNA, 16 bp, Homo sapiens
cgtaatactccatgac

SEQ ID NO: 792 - DNA, 16 bp, Homo sapiens
cttgctcagcagtgtc

SEQ ID NO: 793 - DNA, 16 bp, Homo sapiens
acttgctcagcagtgt

SEQ ID NO: 794 - DNA, 16 bp, Homo sapiens
aacttgctcagcagtg

SEQ ID NO: 795 - DNA, 16 bp, Homo sapiens
cgctccccaaacttgc

SEQ ID NO: 796 - DNA, 16 bp, Homo sapiens
ccgctccccaaacttg

SEQ ID NO: 797 - DNA, 16 bp, Homo sapiens
tccgctccccaaactt

SEQ ID NO: 798 - DNA, 16 bp, Homo sapiens
atccgctccccaaact

SEQ ID NO: 799 - DNA, 16 bp, Homo sapiens
aatccgctccccaaac

SEQ ID NO: 800 - DNA, 16 bp, Homo sapiens
gaatccgctccccaaa

SEQ ID NO: 801 - DNA, 16 bp, Homo sapiens
ggaatccgctccccaa

SEQ ID NO: 802 - DNA, 16 bp, Homo sapiens
cggaatccgctcccca

SEQ ID NO: 803 - DNA, 16 bp, Homo sapiens
ccggaatccgctcccc

SEQ ID NO: 804 - DNA, 16 bp, Homo sapiens
gccggaatccgctccc

SEQ ID NO: 805 - DNA, 16 bp, Homo sapiens
agaagcgcgccatctc

SEQ ID NO: 806 - DNA, 16 bp, Homo sapiens
tagaagcgcgccatct

SEQ ID NO: 807 - DNA, 16 bp, Homo sapiens
gtagaagcgcgccatc

SEQ ID NO: 808 - DNA, 16 bp, Homo sapiens
ggtagaagcgcgccat

SEQ ID NO: 809 - DNA, 16 bp, Homo sapiens
aggtagaagcgcgcca

SEQ ID NO: 810 - DNA, 16 bp, Homo sapiens
caggtagaagcgcgcc

SEQ ID NO: 811 - DNA, 16 bp, Homo sapiens
ccaggtagaagcgcgc

SEQ ID NO: 812 - DNA, 16 bp, Homo sapiens
gccaggtagaagcgcg

SEQ ID NO: 813 - DNA, 16 bp, Homo sapiens
cgccaggtagaagcgc

SEQ ID NO: 814 - DNA, 16 bp, Homo sapiens
ccgccaggtagaagcg

SEQ ID NO: 815 - DNA, 16 bp, Homo sapiens
tccgccaggtagaagc

SEQ ID NO: 816 - DNA, 16 bp, Homo sapiens
tgacaatctccgccag

SEQ ID NO: 817 - DNA, 16 bp, Homo sapiens
atgacaatctccgcca

SEQ ID NO: 818 - DNA, 16 bp, Homo sapiens
catgacaatctccgcc

SEQ ID NO: 819 - DNA, 16 bp, Homo sapiens
ccatgacaatctccgc

SEQ ID NO: 820 - DNA, 16 bp, Homo sapiens
gccatgacaatctccg

SEQ ID NO: 821 - DNA, 16 bp, Homo sapiens
ggccatgacaatctcc

SEQ ID NO: 822 - DNA, 16 bp, Homo sapiens
ccaactgttctcttag

SEQ ID NO: 823 - DNA, 16 bp, Homo sapiens
aaccaactgttctctt

SEQ ID NO: 824 - DNA, 16 bp, Homo sapiens
ccagtaataaaagctg

SEQ ID NO: 825 - DNA, 16 bp, Homo sapiens
gtccagtaataaaagc

SEQ ID NO: 826 - DNA, 16 bp, Homo sapiens
gttgtccagtaataaa

SEQ ID NO: 827 - DNA, 16 bp, Homo sapiens
atgttgtccagtaata

SEQ ID NO: 828 - DNA, 16 bp, Homo sapiens
taatgttgtccagtaa

SEQ ID NO: 829 - DNA, 16 bp, Homo sapiens
ttcaatcctgacccac

SEQ ID NO: 830 - DNA, 16 bp, Homo sapiens
ggttcaatcctgaccc

SEQ ID NO: 831 - DNA, 16 bp, Homo sapiens
tgggttcaatcctgac

SEQ ID NO: 832 - DNA, 16 bp, Homo sapiens
gatgggttcaatcctg

SEQ ID NO: 833 - DNA, 16 bp, Homo sapiens
aggatgggttcaatcc

SEQ ID NO: 834 - DNA, 16 bp, Homo sapiens
agaggatgggttcaat

SEQ ID NO: 835 - DNA, 16 bp, Homo sapiens
cagtccctcctgtggg

SEQ ID NO: 836 - DNA, 16 bp, Homo sapiens
agcagtccctcctgtg

SEQ ID NO: 837 - DNA, 16 bp, Homo sapiens
cccactcagctgtggg

SEQ ID NO: 838 - DNA, 16 bp, Homo sapiens
accccactcagctgtg

SEQ ID NO: 839 - DNA, 16 bp, Homo sapiens
acaccccactcagctg

SEQ ID NO: 840 - DNA, 16 bp, Homo sapiens
gcacaccccactcagc

SEQ ID NO: 841 - DNA, 16 bp, Homo sapiens
tcagcacaccccactc

SEQ ID NO: 842 - DNA, 16 bp, Homo sapiens
gtggtcctaagactgg

SEQ ID NO: 843 - DNA, 16 bp, Homo sapiens
gatgtggtcctaagac

SEQ ID NO: 844 - DNA, 16 bp, Homo sapiens
cagatgtggtcctaag

SEQ ID NO: 845 - DNA, 16 bp, Homo sapiens
cctccacagatgtggt

SEQ ID NO: 846 - DNA, 16 bp, Homo sapiens
ggccacctccacagat

SEQ ID NO: 847 - DNA, 16 bp, Homo sapiens
tgcttggctctggcca

SEQ ID NO: 848 - DNA, 16 bp, Homo sapiens
actgcttggctctggc

SEQ ID NO: 849 - DNA, 16 bp, Homo sapiens
agactgcttggctctg

SEQ ID NO: 850 - DNA, 16 bp, Homo sapiens
ggagactgcttggctc

SEQ ID NO: 851 - DNA, 16 bp, Homo sapiens
tgcagacccctcttct

SEQ ID NO: 852 - DNA, 16 bp, Homo sapiens
ctcctcccttgacatg

SEQ ID NO: 853 - DNA, 16 bp, Homo sapiens
ccagacccccatgttc

SEQ ID NO: 854 - DNA, 16 bp, Homo sapiens
gtccagacccccatgt

SEQ ID NO: 855 - DNA, 16 bp, Homo sapiens
gggtccagacccccat

SEQ ID NO: 856 - DNA, 16 bp, Homo sapiens
accttctgcagggact

SEQ ID NO: 857 - DNA, 16 bp, Homo sapiens
taaaccttctgcaggg

SEQ ID NO: 858 - DNA, 16 bp, Homo sapiens
gaaaagccctgcccct

SEQ ID NO: 859 - DNA, 16 bp, Homo sapiens
taggaaaagccctgcc

SEQ ID NO: 860 - DNA, 16 bp, Homo sapiens
cttaggaaaagccctg

SEQ ID NO: 861 - DNA, 16 bp, Homo sapiens
tgcttaggaaaagccc

SEQ ID NO: 862 - DNA, 16 bp, Homo sapiens
tctgcttaggaaaagc

SEQ ID NO: 863 - DNA, 16 bp, Homo sapiens
ctcctctgcttaggaa

SEQ ID NO: 864 - DNA, 16 bp, Homo sapiens
ccctcctctgcttagg

SEQ ID NO: 865 - DNA, 16 bp, Homo sapiens
ctgatttgaggaaggg

SEQ ID NO: 866 - DNA, 16 bp, Homo sapiens
tcctgatttgaggaag

SEQ ID NO: 867 - DNA, 16 bp, Homo sapiens
cctcctgatttgagga

SEQ ID NO: 868 - DNA, 16 bp, Homo sapiens
gacctcctgatttgag

SEQ ID NO: 869 - DNA, 16 bp, Homo sapiens
aagacctcctgatttg

SEQ ID NO: 870 - DNA, 16 bp, Homo sapiens
ccaagacctcctgatt

SEQ ID NO: 871 - DNA, 16 bp, Homo sapiens
ctgcttccaagacctc

SEQ ID NO: 872 - DNA, 16 bp, Homo sapiens
agctgcttccaagacc

SEQ ID NO: 873 - DNA, 16 bp, Homo sapiens
gcagctgcttccaaga

SEQ ID NO: 874 - DNA, 16 bp, Homo sapiens
ctggtggagaaccaga

SEQ ID NO: 875 - DNA, 16 bp, Homo sapiens
ctctggtggagaacca

SEQ ID NO: 876 - DNA, 16 bp, Homo sapiens
ttctctggtggagaac

SEQ ID NO: 877 - DNA, 16 bp, Homo sapiens
gattctctggtggaga

SEQ ID NO: 878 - DNA, 16 bp, Homo sapiens
acttactgtttcatcc

SEQ ID NO: 879 - DNA, 16 bp, Homo sapiens
gacggaccccctcccc

SEQ ID NO: 880 - DNA, 16 bp, Homo sapiens
ctgacggaccccctcc

SEQ ID NO: 881 - DNA, 16 bp, Homo sapiens
ccctgacggaccccct

SEQ ID NO: 882 - DNA, 16 bp, Homo sapiens
aagccctcaccttttc

SEQ ID NO: 883 - DNA, 16 bp, Homo sapiens
ggaagccctcaccttt

SEQ ID NO: 884 - DNA, 16 bp, Homo sapiens
cgggaagccctcacct

SEQ ID NO: 885 - DNA, 16 bp, Homo sapiens
cccgggaagccctcac

SEQ ID NO: 886 - DNA, 16 bp, Homo sapiens
cacccgggaagccctc

SEQ ID NO: 887 - DNA, 16 bp, Homo sapiens
gccacccgggaagccc

SEQ ID NO: 888 - DNA, 16 bp, Homo sapiens
acgccacccgggaagc

SEQ ID NO: 889 - DNA, 16 bp, Homo sapiens
ttctgttcaggaagtc

SEQ ID NO: 890 - DNA, 16 bp, Homo sapiens
gcttctgttcaggaag

SEQ ID NO: 891 - DNA, 16 bp, Homo sapiens
gcttgggcccacccct

SEQ ID NO: 892 - DNA, 16 bp, Homo sapiens
aggcttgggcccaccc

SEQ ID NO: 893 - DNA, 16 bp, Homo sapiens
cgaggcttgggcccac

SEQ ID NO: 894 - DNA, 16 bp, Homo sapiens
agcgaggcttgggccc

SEQ ID NO: 895 - DNA, 16 bp, Homo sapiens
agagcgaggcttgggc

SEQ ID NO: 896 - DNA, 16 bp, Homo sapiens
gcagagcgaggcttgg

SEQ ID NO: 897 - DNA, 16 bp, Homo sapiens
gagcagagcgaggctt

SEQ ID NO: 898 - DNA, 16 bp, Homo sapiens
aaaggagcagagcgag

SEQ ID NO: 899 - DNA, 16 bp, Homo sapiens
caaaaggagcagagcg

SEQ ID NO: 900 - DNA, 16 bp, Homo sapiens
tggaccaaaaggagca

SEQ ID NO: 901 - DNA, 16 bp, Homo sapiens
cctggaccaaaaggag

SEQ ID NO: 902 - DNA, 16 bp, Homo sapiens
cacctggaccaaaagg

SEQ ID NO: 903 - DNA, 16 bp, Homo sapiens
cgcacctggaccaaaa

SEQ ID NO: 904 - DNA, 16 bp, Homo sapiens
gaccgcacctggacca

SEQ ID NO: 905 - DNA, 16 bp, Homo sapiens
accttgtagtggacga

SEQ ID NO: 906 - DNA, 16 bp, Homo sapiens
tcaccttgtagtggac

SEQ ID NO: 907 - DNA, 16 bp, Homo sapiens
gctcaccttgtagtgg

SEQ ID NO: 908 - DNA, 16 bp, Homo sapiens
ggagaggaggcgatag

SEQ ID NO: 909 - DNA, 16 bp, Homo sapiens
agggagaggaggcgat

SEQ ID NO: 910 - DNA, 16 bp, Homo sapiens
gtgctcctgctcagag

SEQ ID NO: 911 - DNA, 16 bp, Homo sapiens
aggtgctcctgctcag

SEQ ID NO: 912 - DNA, 16 bp, Homo sapiens
agaggtgctcctgctc

SEQ ID NO: 913 - DNA, 16 bp, Homo sapiens
agagaggtgctcctgc

SEQ ID NO: 914 - DNA, 16 bp, Homo sapiens
accccgcccccgctca

SEQ ID NO: 915 - DNA, 16 bp, Homo sapiens
ctaccccgcccccgct

SEQ ID NO: 916 - DNA, 16 bp, Homo sapiens
acctaccccgcccccg

SEQ ID NO: 917 - DNA, 16 bp, Homo sapiens
gtacctaccccgcccc

SEQ ID NO: 918 - DNA, 16 bp, Homo sapiens
aggtacctaccccgcc

SEQ ID NO: 919 - DNA, 16 bp, Homo sapiens
gggaggttcccgcagc

SEQ ID NO: 920 - DNA, 16 bp, Homo sapiens
gtccttactccaactt

SEQ ID NO: 921 - DNA, 16 bp, Homo sapiens
ctgtccttactccaac

SEQ ID NO: 922 - DNA, 16 bp, Homo sapiens
cactgtccttactcca

SEQ ID NO: 923 - DNA, 16 bp, Homo sapiens
ggcactgtccttactc

SEQ ID NO: 924 - DNA, 16 bp, Homo sapiens
taggcactgtccttac

SEQ ID NO: 925 - DNA, 16 bp, Homo sapiens
ggtaggcactgtcctt

SEQ ID NO: 926 - DNA, 16 bp, Homo sapiens
aggtcactgctgggtc

SEQ ID NO: 927 - DNA, 16 bp, Homo sapiens
ctaggtcactgctggg

SEQ ID NO: 928 - DNA, 16 bp, Homo sapiens
gtctaggtcactgctg

SEQ ID NO: 929 - DNA, 16 bp, Homo sapiens
aagtctaggtcactgc

SEQ ID NO: 930 - DNA, 16 bp, Homo sapiens
gcactccattgtctca

SEQ ID NO: 931 - DNA, 16 bp, Homo sapiens
ctgcactccattgtct

SEQ ID NO: 932 - DNA, 16 bp, Homo sapiens
ccctgcactccattgt

SEQ ID NO: 933 - DNA, 16 bp, Homo sapiens
ccccctgcactccatt

SEQ ID NO: 934 - DNA, 16 bp, Homo sapiens
cttgctgagtcaggag

SEQ ID NO: 935 - DNA, 16 bp, Homo sapiens
tccttgctgagtcagg

SEQ ID NO: 936 - DNA, 16 bp, Homo sapiens
cttccttgctgagtca

SEQ ID NO: 937 - DNA, 16 bp, Homo sapiens
accttccttgctgagt

SEQ ID NO: 938 - DNA, 16 bp, Homo sapiens
ggaccttccttgctga

SEQ ID NO: 939 - DNA, 16 bp, Homo sapiens
caggaccttccttgct

SEQ ID NO: 940 - DNA, 16 bp, Homo sapiens
agccctccaggacctt

SEQ ID NO: 941 - DNA, 16 bp, Homo sapiens
tagctccccactccag

SEQ ID NO: 942 - DNA, 16 bp, Homo sapiens
gatagctccccactcc

SEQ ID NO: 943 - DNA, 16 bp, Homo sapiens
cagatagctccccact

SEQ ID NO: 944 - DNA, 16 bp, Homo sapiens
ctcagatagctcccca

SEQ ID NO: 945 - DNA, 16 bp, Homo sapiens
agctcagatagctccc

SEQ ID NO: 946 - DNA, 16 bp, Homo sapiens
tcagctcagatagctc

SEQ ID NO: 947 - DNA, 16 bp, Homo sapiens
tctcagctcagatagc

SEQ ID NO: 948 - DNA, 16 bp, Homo sapiens
gagtcctctcctgctt

SEQ ID NO: 949 - DNA, 16 bp, Homo sapiens
ggaggagtcctctcct

SEQ ID NO: 950 - DNA, 16 bp, Homo sapiens
gaggaggagtcctctc

SEQ ID NO: 951 - DNA, 16 bp, Homo sapiens
caaaagggcacccaga

SEQ ID NO: 952 - DNA, 16 bp, Homo sapiens
agcaaaagggcaccca

SEQ ID NO: 953 - DNA, 16 bp, Homo sapiens
ggatccccagtattgt

SEQ ID NO: 954 - DNA, 16 bp, Homo sapiens
ctggatccccagtatt

SEQ ID NO: 955 - DNA, 16 bp, Homo sapiens
tgctggatccccagta

SEQ ID NO: 956 - DNA, 16 bp, Homo sapiens
attctctagactgcaa

SEQ ID NO: 957 - DNA, 16 bp, Homo sapiens
taattctctagactgc

SEQ ID NO: 958 - DNA, 16 bp, Homo sapiens
tctaattctctagact

SEQ ID NO: 959 - DNA, 16 bp, Homo sapiens
tctctaattctctaga

SEQ ID NO: 960 - DNA, 16 bp, Homo sapiens
ctccataattctctaa

SEQ ID NO: 961 - DNA, 16 bp, Homo sapiens
actctccataattctc

SEQ ID NO: 962 - DNA, 16 bp, Homo sapiens
acactctccataattc

SEQ ID NO: 963 - DNA, 16 bp, Homo sapiens
ccacactctccataat

SEQ ID NO: 964 - DNA, 16 bp, Homo sapiens
tgccacactctccata

SEQ ID NO: 965 - DNA, 16 bp, Homo sapiens
cccatgcccatcctgc

SEQ ID NO: 966 - DNA, 16 bp, Homo sapiens
ggacagagaaatgttg

SEQ ID NO: 967 - DNA, 16 bp, Homo sapiens
gtggcataggacagag

SEQ ID NO: 968 - DNA, 16 bp, Homo sapiens
tggtggcataggacag

SEQ ID NO: 969 - DNA, 16 bp, Homo sapiens
accttactctgcccct

SEQ ID NO: 970 - DNA, 16 bp, Homo sapiens
tgaccttactctgccc

SEQ ID NO: 971 - DNA, 16 bp, Homo sapiens
gctgaccttactctgc

SEQ ID NO: 972 - DNA, 16 bp, Homo sapiens
ctgctgaccttactct

SEQ ID NO: 973 - DNA, 16 bp, Homo sapiens
ctctgctgaccttact

SEQ ID NO: 974 - DNA, 16 bp, Homo sapiens
gcctctgctgacctta

SEQ ID NO: 975 - DNA, 16 bp, Homo sapiens
ccatggctctgagtca

SEQ ID NO: 976 - DNA, 16 bp, Homo sapiens
agccatggctctgagt

SEQ ID NO: 977 - DNA, 16 bp, Homo sapiens
tagcctgctgtgactc

SEQ ID NO: 978 - DNA, 16 bp, Homo sapiens
atgggaggctgttggc

SEQ ID NO: 979 - DNA, 16 bp, Homo sapiens
ccatgggaggctgttg

SEQ ID NO: 980 - DNA, 16 bp, Homo sapiens
ggccatgggaggctgt

SEQ ID NO: 981 - DNA, 16 bp, Homo sapiens
gtgcagagaggccatg

SEQ ID NO: 982 - DNA, 16 bp, Homo sapiens
gagctcccagcatgac

SEQ ID NO: 983 - DNA, 16 bp, Homo sapiens
agggagctcccagcat

SEQ ID NO: 984 - DNA, 16 bp, Homo sapiens
gccatagagcccactt

SEQ ID NO: 985 - DNA, 16 bp, Homo sapiens
gggccatagagcccac

SEQ ID NO: 986 - DNA, 16 bp, Homo sapiens
agctgccccatgctgg

SEQ ID NO: 987 - DNA, 16 bp, Homo sapiens
cgcccctggcagctgc

SEQ ID NO: 988 - DNA, 16 bp, Homo sapiens
tgcgcccctggcagct

SEQ ID NO: 989 - DNA, 16 bp, Homo sapiens
gctgcgcccctggcag

SEQ ID NO: 990 - DNA, 16 bp, Homo sapiens
cggctgcgcccctggc

SEQ ID NO: 991 - DNA, 16 bp, Homo sapiens
gtcggctgcgcccctg

SEQ ID NO: 992 - DNA, 16 bp, Homo sapiens
ctgtcggctgcgcccc

SEQ ID NO: 993 - DNA, 16 bp, Homo sapiens
gcctgtcggctgcgcc

SEQ ID NO: 994 - DNA, 16 bp, Homo sapiens
ctgcctgtcggctgcg

SEQ ID NO: 995 - DNA, 16 bp, Homo sapiens
acctgcctgtcggctg

SEQ ID NO: 996 - DNA, 16 bp, Homo sapiens
acacctgcctgtcggc

SEQ ID NO: 997 - DNA, 16 bp, Homo sapiens
gaacacctgcctgtcg

SEQ ID NO: 998 - DNA, 16 bp, Homo sapiens
cgccgaacacctgcct

SEQ ID NO: 999 - DNA, 16 bp, Homo sapiens
cctgggcacctgttgg

SEQ ID NO: 1000 - DNA, 16 bp, Homo sapiens
gtgcctgggcacctgt

SEQ ID NO: 1001 - DNA, 16 bp, Homo sapiens
cgccctcccagtgcct

SEQ ID NO: 1002 - DNA, 16 bp, Homo sapiens
accgccctcccagtgc

SEQ ID NO: 1003 - DNA, 16 bp, Homo sapiens
tcaccgccctcccagt

SEQ ID NO: 1004 - DNA, 16 bp, Homo sapiens
agtcaccgccctccca

SEQ ID NO: 1005 - DNA, 16 bp, Homo sapiens
tgagtcaccgccctcc

SEQ ID NO: 1006 - DNA, 16 bp, Homo sapiens
cgtgagtcaccgccct

SEQ ID NO: 1007 - DNA, 16 bp, Homo sapiens
caaagctggttctccc

SEQ ID NO: 1008 - DNA, 16 bp, Homo sapiens
tgcaaagctggttctc

SEQ ID NO: 1009 - DNA, 16 bp, Homo sapiens
tctgcaaagctggttc

SEQ ID NO: 1010 - DNA, 16 bp, Homo sapiens
cctgtctgcaaagctg

SEQ ID NO: 1011 - DNA, 16 bp, Homo sapiens
cgcctgtctgcaaagc

SEQ ID NO: 1012 - DNA, 16 bp, Homo sapiens
ttgtccctcctggatc

SEQ ID NO: 1013 - DNA, 16 bp, Homo sapiens
agttgtccctcctgga

SEQ ID NO: 1014 - DNA, 16 bp, Homo sapiens
aaagttgtccctcctg

SEQ ID NO: 1015 - DNA, 16 bp, Homo sapiens
ccaaagttgtccctcc

SEQ ID NO: 1016 - DNA, 16 bp, Homo sapiens
acccaaagttgtccct

SEQ ID NO: 1017 - DNA, 16 bp, Homo sapiens
gaacccaaagttgtcc

SEQ ID NO: 1018 - DNA, 16 bp, Homo sapiens
gaagaacccaaagttg

SEQ ID NO: 1019 - DNA, 16 bp, Homo sapiens
ccagaagaacccaaag

SEQ ID NO: 1020 - DNA, 16 bp, Homo sapiens
cacccagaagaaccca

SEQ ID NO: 1021 - DNA, 16 bp, Homo sapiens
gcagaacctacaaaag

SEQ ID NO: 1022 - DNA, 16 bp, Homo sapiens
gtgcagaacctacaaa

SEQ ID NO: 1023 - DNA, 16 bp, Homo sapiens
gggtgcagaacctaca

SEQ ID NO: 1024 - DNA, 16 bp, Homo sapiens
gtgggtgcagaaccta

SEQ ID NO: 1025 - DNA, 16 bp, Homo sapiens
ccacacggctcatagg

SEQ ID NO: 1026 - DNA, 16 bp, Homo sapiens
acccacacggctcata

SEQ ID NO: 1027 - DNA, 16 bp, Homo sapiens
tgacccacacggctca

SEQ ID NO: 1028 - DNA, 16 bp, Homo sapiens
gctgacccacacggct

SEQ ID NO: 1029 - DNA, 16 bp, Homo sapiens
tggctgacccacacgg

SEQ ID NO: 1030 - DNA, 16 bp, Homo sapiens
ggtggctgacccacac

SEQ ID NO: 1031 - DNA, 16 bp, Homo sapiens
atggtggctgacccac

SEQ ID NO: 1032 - DNA, 16 bp, Homo sapiens
gaatggtggctgaccc

SEQ ID NO: 1033 - DNA, 16 bp, Homo sapiens
ctaaaggacgcaggga

SEQ ID NO: 1034 - DNA, 16 bp, Homo sapiens
aactaaaggacgcagg

SEQ ID NO: 1035 - DNA, 16 bp, Homo sapiens
gagaactaaaggacgc

SEQ ID NO: 1036 - DNA, 16 bp, Homo sapiens
attggtcccaagcccc

SEQ ID NO: 1037 - DNA, 16 bp, Homo sapiens
gcccattggtcccaag

SEQ ID NO: 1038 - DNA, 16 bp, Homo sapiens
acgcccattggtccca

SEQ ID NO: 1039 - DNA, 16 bp, Homo sapiens
ccacgcccattggtcc

SEQ ID NO: 1040 - DNA, 16 bp, Homo sapiens
caccacgcccattggt

SEQ ID NO: 1041 - DNA, 16 bp, Homo sapiens
agacccaactccaccc

SEQ ID NO: 1042 - DNA, 16 bp, Homo sapiens
tcacctcgcccctctt

SEQ ID NO: 1043 - DNA, 16 bp, Homo sapiens
cctcacctcgcccctc

SEQ ID NO: 1044 - DNA, 16 bp, Homo sapiens
agcccctcacctcgcc

SEQ ID NO: 1045 - DNA, 16 bp, Homo sapiens
ctcaaagccccccacg

SEQ ID NO: 1046 - DNA, 16 bp, Homo sapiens
ggatcctcaaagcccc

SEQ ID NO: 1047 - DNA, 16 bp, Homo sapiens
gcggatcctcaaagcc

SEQ ID NO: 1048 - DNA, 16 bp, Homo sapiens
gcgcggatcctcaaag

SEQ ID NO: 1049 - DNA, 16 bp, Homo sapiens
gggcgcggatcctcaa

SEQ ID NO: 1050 - DNA, 16 bp, Homo sapiens
gagctgcagccggaga

SEQ ID NO: 1051 - DNA, 16 bp, Homo sapiens
aggagctgcagccgga

SEQ ID NO: 1052 - DNA, 16 bp, Homo sapiens
cggaggagctgcagcc

SEQ ID NO: 1053 - DNA, 16 bp, Homo sapiens
acccggaggagctgca

SEQ ID NO: 1054 - DNA, 16 bp, Homo sapiens
gcacccggaggagctg

SEQ ID NO: 1055 - DNA, 16 bp, Homo sapiens
gggcacccggaggagc

SEQ ID NO: 1056 - DNA, 16 bp, Homo sapiens
cagggcacccggagga

SEQ ID NO: 1057 - DNA, 16 bp, Homo sapiens
tgcagggcacccggag

SEQ ID NO: 1058 - DNA, 16 bp, Homo sapiens
cctgcagggcacccgg

SEQ ID NO: 1059 - DNA, 16 bp, Homo sapiens
cgacacctgcagggca

SEQ ID NO: 1060 - DNA, 16 bp, Homo sapiens
cacgacacctgcaggg

SEQ ID NO: 1061 - DNA, 16 bp, Homo sapiens
agcacgacacctgcag

SEQ ID NO: 1062 - DNA, 16 bp, Homo sapiens
gaagcacgacacctgc

SEQ ID NO: 1063 - DNA, 16 bp, Homo sapiens
ccaggtagttctcatc

SEQ ID NO: 1064 - DNA, 16 bp, Homo sapiens
caccaggtagttctca

SEQ ID NO: 1065 - DNA, 16 bp, Homo sapiens
ctcaccaggtagttct

SEQ ID NO: 1066 - DNA, 16 bp, Homo sapiens
agctcaccaggtagtt

SEQ ID NO: 1067 - DNA, 16 bp, Homo sapiens
ggagctcaccaggtag

SEQ ID NO: 1068 - DNA, 16 bp, Homo sapiens
ccggagctcaccaggt

SEQ ID NO: 1069 - DNA, 16 bp, Homo sapiens
gcccggagctcaccag

SEQ ID NO: 1070 - DNA, 16 bp, Homo sapiens
cctagagcttcctctc

SEQ ID NO: 1071 - DNA, 16 bp, Homo sapiens
caatcctagagcttcc

SEQ ID NO: 1072 - DNA, 16 bp, Homo sapiens
cccccaatcctagagc

SEQ ID NO: 1073 - DNA, 16 bp, Homo sapiens
cacccccaatcctaga

SEQ ID NO: 1074 - DNA, 16 bp, Homo sapiens
gcagcacccccaatcc

SEQ ID NO: 1075 - DNA, 16 bp, Homo sapiens
gggcagcacccccaat

SEQ ID NO: 1076 - DNA, 16 bp, Homo sapiens
tgacacaccctcttac

SEQ ID NO: 1077 - DNA, 16 bp, Homo sapiens
cctgacacaccctctt

SEQ ID NO: 1078 - DNA, 16 bp, Homo sapiens
cacctgacacaccctc

SEQ ID NO: 1079 - DNA, 16 bp, Homo sapiens
tccacctgacacaccc

SEQ ID NO: 1080 - DNA, 16 bp, Homo sapiens
catccacctgacacac

SEQ ID NO: 1081 - DNA, 16 bp, Homo sapiens
ctcatccacctgacac

SEQ ID NO: 1082 - DNA, 16 bp, Homo sapiens
ccctcatccacctgac

SEQ ID NO: 1083 - DNA, 16 bp, Homo sapiens
gcccctcatccacctg

SEQ ID NO: 1084 - DNA, 16 bp, Homo sapiens
gaaggcccctcatcca

SEQ ID NO: 1085 - DNA, 16 bp, Homo sapiens
ccaggtaagagacccc

SEQ ID NO: 1086 - DNA, 16 bp, Homo sapiens
ttccaggtaagagacc

SEQ ID NO: 1087 - DNA, 16 bp, Homo sapiens
ccattccaggtaagag

SEQ ID NO: 1088 - DNA, 16 bp, Homo sapiens
tcccattccaggtaag

SEQ ID NO: 1089 - DNA, 16 bp, Homo sapiens
tatcccattccaggta

SEQ ID NO: 1090 - DNA, 16 bp, Homo sapiens
cctatcccattccagg

SEQ ID NO: 1091 - DNA, 16 bp, Homo sapiens
gacctatcccattcca

SEQ ID NO: 1092 - DNA, 16 bp, Homo sapiens
aagacctatcccattc

SEQ ID NO: 1093 - DNA, 16 bp, Homo sapiens
tgaagacctatcccat

SEQ ID NO: 1094 - DNA, 16 bp, Homo sapiens
tggccccgttagaatt

SEQ ID NO: 1095 - DNA, 16 bp, Homo sapiens
agtggccccgttagaa

SEQ ID NO: 1096 - DNA, 16 bp, Homo sapiens
gcagtggccccgttag

SEQ ID NO: 1097 - DNA, 16 bp, Homo sapiens
aggcagtggccccgtt

SEQ ID NO: 1098 - DNA, 16 bp, Homo sapiens
ctaggcagtggccccg

SEQ ID NO: 1099 - DNA, 16 bp, Homo sapiens
ccctaggcagtggccc

SEQ ID NO: 1100 - DNA, 16 bp, Homo sapiens
aggtcccagacactcc

SEQ ID NO: 1101 - DNA, 16 bp, Homo sapiens
ataggtcccagacact

SEQ ID NO: 1102 - DNA, 16 bp, Homo sapiens
gaataggtcccagaca

SEQ ID NO: 1103 - DNA, 16 bp, Homo sapiens
gagaataggtcccaga

SEQ ID NO: 1104 - DNA, 16 bp, Homo sapiens
cagagaataggtccca

SEQ ID NO: 1105 - DNA, 20 bp, Homo sapiens
ctggctgcatgtctgcctgt

SEQ ID NO: 1106 - DNA, 20 bp, Homo sapiens
ccaggagaaggtcgagcagg

SEQ ID NO: 1107 - DNA, 20 bp, Homo sapiens
tctatggccatgacaatctc

SEQ ID NO: 1108 - DNA, 20 bp, Homo sapiens
atgtccctgtgcacgtagcc

SEQ ID NO: 1109 - DNA, 20 bp, Homo sapiens
atgtgtccggaagtcgcctg

SEQ ID NO: 1110 - DNA, 20 bp, Homo sapiens
ctcaggctctgccgggtgag

SEQ ID NO: 1111 - DNA, 20 bp, Homo sapiens
ggcactggcccacagccacg

SEQ ID NO: 1112 - DNA, 20 bp, Homo sapiens
cctggccgaaagaaagaaat

SEQ ID NO: 1113 - DNA, 20 bp, Homo sapiens
aaagaaatggtctgtgatcc

SEQ ID NO: 1114 - DNA, 20 bp, Homo sapiens
aagaaagaaatggtctgtga

SEQ ID NO: 1115 - DNA, 20 bp, Homo sapiens
ggccgaaagaaagaaatggt

SEQ ID NO: 1116 - DNA, 20 bp, Homo sapiens
cctcagcctggccgaaagaa

SEQ ID NO: 1117 - DNA, 20 bp, Homo sapiens
gggcctcagcctggccgaaa

SEQ ID NO: 1118 - DNA, 20 bp, Homo sapiens
tcagggcctcagcctggccg

SEQ ID NO: 1119 - DNA, 20 bp, Homo sapiens
ctgcagtttgcccatccacg

SEQ ID NO: 1120 - DNA, 20 bp, Homo sapiens
ggcctgcagtttgcccatcc

SEQ ID NO: 1121 - DNA, 20 bp, Homo sapiens
ccaggcctgcagtttgccca

SEQ ID NO: 1122 - DNA, 20 bp, Homo sapiens
gccttcccaggcctgcagtt

SEQ ID NO: 1123 - DNA, 20 bp, Homo sapiens
gctgccttcccaggcctgca

SEQ ID NO: 1124 - DNA, 20 bp, Homo sapiens
cttgctgccttcccaggcct

SEQ ID NO: 1125 - DNA, 20 bp, Homo sapiens
gcccggcttgctgccttccc

SEQ ID NO: 1126 - DNA, 20 bp, Homo sapiens
acggcccggcttgctgcctt

SEQ ID NO: 1127 - DNA, 20 bp, Homo sapiens
cggacggcccggcttgctgc

SEQ ID NO: 1128 - DNA, 20 bp, Homo sapiens
acacggacggcccggcttgc

SEQ ID NO: 1129 - DNA, 20 bp, Homo sapiens
gatggaacacggacggcccg

SEQ ID NO: 1130 - DNA, 20 bp, Homo sapiens
gaggatggaacacggacggc

SEQ ID NO: 1131 - DNA, 20 bp, Homo sapiens
gtggaggatggaacacggac

SEQ ID NO: 1132 - DNA, 20 bp, Homo sapiens
gcgaaccaacgataggtggg

SEQ ID NO: 1133 - DNA, 20 bp, Homo sapiens
tttgcgaaccaacgataggt

SEQ ID NO: 1134 - DNA, 20 bp, Homo sapiens
gctttgcactttgcgaacca

SEQ ID NO: 1135 - DNA, 20 bp, Homo sapiens
aaagctttgcactttgcgaa

SEQ ID NO: 1136 - DNA, 20 bp, Homo sapiens
cacaagaaagctttgcactt

SEQ ID NO: 1137 - DNA, 20 bp, Homo sapiens
gtcatgcacaagaaagcttt

SEQ ID NO: 1138 - DNA, 20 bp, Homo sapiens
acgctccccagagcagggcg

SEQ ID NO: 1139 - DNA, 20 bp, Homo sapiens
gcagagatcgcgccagacgc

SEQ ID NO: 1140 - DNA, 20 bp, Homo sapiens
caggcagagatcgcgccaga

SEQ ID NO: 1141 - DNA, 20 bp, Homo sapiens
aagcaggcagagatcgcgcc

SEQ ID NO: 1142 - DNA, 20 bp, Homo sapiens
ccgagtaagcaggcagagat

SEQ ID NO: 1143 - DNA, 20 bp, Homo sapiens
ttcccgagtaagcaggcaga

SEQ ID NO: 1144 - DNA, 20 bp, Homo sapiens
gcaaatttcccgagtaagca

SEQ ID NO: 1145 - DNA, 20 bp, Homo sapiens
aaagcaaatttcccgagtaa

SEQ ID NO: 1146 - DNA, 20 bp, Homo sapiens
ttggcaaaagcaaatttccc

SEQ ID NO: 1147 - DNA, 20 bp, Homo sapiens
ggtttggcaaaagcaaattt

SEQ ID NO: 1148 - DNA, 20 bp, Homo sapiens
gcgggtttggcaaaagcaaa

SEQ ID NO: 1149 - DNA, 20 bp, Homo sapiens
aaagcgggtttggcaaaagc

SEQ ID NO: 1150 - DNA, 20 bp, Homo sapiens
cccgaaaaagcgggtttggc

SEQ ID NO: 1151 - DNA, 20 bp, Homo sapiens
atccccgaaaaagcgggttt

SEQ ID NO: 1152 - DNA, 20 bp, Homo sapiens
cgggatccccgaaaaagcgg

SEQ ID NO: 1153 - DNA, 20 bp, Homo sapiens
gcgcgggatccccgaaaaag

SEQ ID NO: 1154 - DNA, 20 bp, Homo sapiens
gagagcagcgcaagtgagga

SEQ ID NO: 1155 - DNA, 20 bp, Homo sapiens
tccgagagcagcgcaagtga

SEQ ID NO: 1156 - DNA, 20 bp, Homo sapiens
ggctccgagagcagcgcaag

SEQ ID NO: 1157 - DNA, 20 bp, Homo sapiens
aagcgggcggagccggctgg

SEQ ID NO: 1158 - DNA, 20 bp, Homo sapiens
ccgaagcgggcggagccggc

SEQ ID NO: 1159 - DNA, 20 bp, Homo sapiens
aaaccgccgaagcgggcgga

SEQ ID NO: 1160 - DNA, 20 bp, Homo sapiens
tccaaaccgccgaagcgggc

SEQ ID NO: 1161 - DNA, 20 bp, Homo sapiens
atatccaaaccgccgaagcg

SEQ ID NO: 1162 - DNA, 20 bp, Homo sapiens
taaatatccaaaccgccgaa

SEQ ID NO: 1163 - DNA, 20 bp, Homo sapiens
caataaatatccaaaccgcc

SEQ ID NO: 1164 - DNA, 20 bp, Homo sapiens
cgaggtcaataaatatccaa

SEQ ID NO: 1165 - DNA, 20 bp, Homo sapiens
ggacgaggtcaataaatatc

SEQ ID NO: 1166 - DNA, 20 bp, Homo sapiens
ggaggacgaggtcaataaat

SEQ ID NO: 1167 - DNA, 20 bp, Homo sapiens
cgagtcggaggacgaggtca

SEQ ID NO: 1168 - DNA, 20 bp, Homo sapiens
tgtcagcgagtcggaggacg

SEQ ID NO: 1169 - DNA, 20 bp, Homo sapiens
gcctgtcagcgagtcggagg

SEQ ID NO: 1170 - DNA, 20 bp, Homo sapiens
gtagcctgtcagcgagtcgg

SEQ ID NO: 1171 - DNA, 20 bp, Homo sapiens
cctgtagcctgtcagcgagt

SEQ ID NO: 1172 - DNA, 20 bp, Homo sapiens
ggtcctgtagcctgtcagcg

SEQ ID NO: 1173 - DNA, 20 bp, Homo sapiens
aaataccgaggaatgtcggg

SEQ ID NO: 1174 - DNA, 20 bp, Homo sapiens
aataaataccgaggaatgtc

SEQ ID NO: 1175 - DNA, 20 bp, Homo sapiens
gacaataaataccgaggaat

SEQ ID NO: 1176 - DNA, 20 bp, Homo sapiens
cggggccccggagtcgaaga

SEQ ID NO: 1177 - DNA, 20 bp, Homo sapiens
ccaacggggccccggagtcg

SEQ ID NO: 1178 - DNA, 20 bp, Homo sapiens
ttccaacggggccccggagt

SEQ ID NO: 1179 - DNA, 20 bp, Homo sapiens
gtcttccaacggggccccgg

SEQ ID NO: 1180 - DNA, 20 bp, Homo sapiens
cagtcttccaacggggcccc

SEQ ID NO: 1181 - DNA, 20 bp, Homo sapiens
ctcagtcttccaacggggcc

SEQ ID NO: 1182 - DNA, 20 bp, Homo sapiens
gcactcagtcttccaacggg

SEQ ID NO: 1183 - DNA, 20 bp, Homo sapiens
ccccgggcactcagtcttcc

SEQ ID NO: 1184 - DNA, 20 bp, Homo sapiens
tgccccgggcactcagtctt

SEQ ID NO: 1185 - DNA, 20 bp, Homo sapiens
cgtgccccgggcactcagtc

SEQ ID NO: 1186 - DNA, 20 bp, Homo sapiens
gtgccgtgccccgggcactc

SEQ ID NO: 1187 - DNA, 20 bp, Homo sapiens
tctgtgccgtgccccgggca

SEQ ID NO: 1188 - DNA, 20 bp, Homo sapiens
gcttctgtgccgtgccccgg

SEQ ID NO: 1189 - DNA, 20 bp, Homo sapiens
gcggcttctgtgccgtgccc

SEQ ID NO: 1190 - DNA, 20 bp, Homo sapiens
gcgcggcttctgtgccgtgc

SEQ ID NO: 1191 - DNA, 20 bp, Homo sapiens
gggcgcggcttctgtgccgt

SEQ ID NO: 1192 - DNA, 20 bp, Homo sapiens
ggcggtgggcgcggcttctg

SEQ ID NO: 1193 - DNA, 20 bp, Homo sapiens
ggcaggcggtgggcgcggct

SEQ ID NO: 1194 - DNA, 20 bp, Homo sapiens
ctggcaggcggtgggcgcgg

SEQ ID NO: 1195 - DNA, 20 bp, Homo sapiens
aactggcaggcggtgggcgc

SEQ ID NO: 1196 - DNA, 20 bp, Homo sapiens
gtgaactggcaggcggtggg

SEQ ID NO: 1197 - DNA, 20 bp, Homo sapiens
ggttgtgaactggcaggcgg

SEQ ID NO: 1198 - DNA, 20 bp, Homo sapiens
gcggttgtgaactggcaggc

SEQ ID NO: 1199 - DNA, 20 bp, Homo sapiens
cgctcggagcggttgtgaac

SEQ ID NO: 1200 - DNA, 20 bp, Homo sapiens
cccacgctcggagcggttgt

SEQ ID NO: 1201 - DNA, 20 bp, Homo sapiens
agacccacgctcggagcggt

SEQ ID NO: 1202 - DNA, 20 bp, Homo sapiens
cggagacccacgctcggagc

SEQ ID NO: 1203 - DNA, 20 bp, Homo sapiens
gggcggagacccacgctcgg

SEQ ID NO: 1204 - DNA, 20 bp, Homo sapiens
gctgggcggagacccacgct

SEQ ID NO: 1205 - DNA, 20 bp, Homo sapiens
ggagctgggcggagacccac

SEQ ID NO: 1206 - DNA, 20 bp, Homo sapiens
ctggagctgggcggagaccc

SEQ ID NO: 1207 - DNA, 20 bp, Homo sapiens
ggactggagctgggcggaga

SEQ ID NO: 1208 - DNA, 20 bp, Homo sapiens
caggactggagctgggcgga

SEQ ID NO: 1209 - DNA, 20 bp, Homo sapiens
atcacaggactggagctggg

SEQ ID NO: 1210 - DNA, 20 bp, Homo sapiens
gggcgggcccggatcacagg

SEQ ID NO: 1211 - DNA, 20 bp, Homo sapiens
gggggcgggcccggatcaca

SEQ ID NO: 1212 - DNA, 20 bp, Homo sapiens
aggcagcaccatggcccctc

SEQ ID NO: 1213 - DNA, 20 bp, Homo sapiens
ggtccaacaccagctgctgg

SEQ ID NO: 1214 - DNA, 20 bp, Homo sapiens
cgatcaccttcagaatctcg

SEQ ID NO: 1215 - DNA, 20 bp, Homo sapiens
cttgttcatgatcttcatgg

SEQ ID NO: 1216 - DNA, 20 bp, Homo sapiens
ccccattcaccaacacgtcc

SEQ ID NO: 1217 - DNA, 20 bp, Homo sapiens
gcgtgatccaccgccggtcc

SEQ ID NO: 1218 - DNA, 20 bp, Homo sapiens
gtaatactccatgaccaggt

SEQ ID NO: 1219 - DNA, 20 bp, Homo sapiens
gcagtgtcagcaggtccccg

SEQ ID NO: 1220 - DNA, 20 bp, Homo sapiens
caccgagtctatggccatga

SEQ ID NO: 1221 - DNA, 20 bp, Homo sapiens
acgtagccaagccggtgcac

SEQ ID NO: 1222 - DNA, 20 bp, Homo sapiens
atgtggccacagcggtccag

SEQ ID NO: 1223 - DNA, 20 bp, Homo sapiens
cttcgtccaccagcggcaga

SEQ ID NO: 1224 - DNA, 20 bp, Homo sapiens
gaccccttcgtccaccagcg

SEQ ID NO: 1225 - DNA, 20 bp, Homo sapiens
cctgctccaccccggcccag

SEQ ID NO: 1226 - DNA, 20 bp, Homo sapiens
cggaagtcgcctgctccacc

SEQ ID NO: 1227 - DNA, 20 bp, Homo sapiens
cggagaccatcccagtcgag

SEQ ID NO: 1228 - DNA, 20 bp, Homo sapiens
tgagggccatgcaggagtag

SEQ ID NO: 1229 - DNA, 20 bp, Homo sapiens
ctccagttccatgggtgtgg

SEQ ID NO: 1230 - DNA, 20 bp, Homo sapiens
gcgcttgcacgtgtggctca

SEQ ID NO: 1231 - DNA, 20 bp, Homo sapiens
gccacttcagctgtttcatc

SEQ ID NO: 1232 - DNA, 20 bp, Homo sapiens
gcctcagcctctgccgcagg

SEQ ID NO: 1233 - DNA, 20 bp, Homo sapiens
gcagcgtcacctcggcctca

SEQ ID NO: 1234 - DNA, 20 bp, Homo sapiens
ggctcaggctctgccgggtg

SEQ ID NO: 1235 - DNA, 20 bp, Homo sapiens
ttccgagcctctgcctcgcg

SEQ ID NO: 1236 - DNA, 20 bp, Homo sapiens
ggtcccggttccgagcctct

SEQ ID NO: 1237 - DNA, 20 bp, Homo sapiens
atccgctcctgcaactgccg

SEQ ID NO: 1238 - DNA, 20 bp, Homo sapiens
gcaactccatccgctcctgc

SEQ ID NO: 1239 - DNA, 20 bp, Homo sapiens
aggtggatccgtggcccggg

SEQ ID NO: 1240 - DNA, 20 bp, Homo sapiens
cgcggcttctgtgccgtgcc

SEQ ID NO: 1241 - DNA, 20 bp, Homo sapiens
ttgctgccttcccaggcctg

SEQ ID NO: 1242 - DNA, 20 bp, Homo sapiens
cactgagggccagacatatg

SEQ ID NO: 1243 - DNA, 20 bp, Homo sapiens
ctctagattcagatgcaggt

SEQ ID NO: 1244 - DNA, 20 bp, Homo sapiens
gcctggcagcccctgtccag

SEQ ID NO: 1245 - DNA, 20 bp, Homo sapiens
ggcctggcagcccctgtcca

SEQ ID NO: 1246 - DNA, 20 bp, Homo sapiens
gggcctggcagcccctgtcc

SEQ ID NO: 1247 - DNA, 20 bp, Homo sapiens
atggcccctccccgggccgg

SEQ ID NO: 1248 - DNA, 20 bp, Homo sapiens
catggcccctccccgggccg

SEQ ID NO: 1249 - DNA, 20 bp, Homo sapiens
ccatggcccctccccgggcc

SEQ ID NO: 1250 - DNA, 20 bp, Homo sapiens
accatggcccctccccgggc

SEQ ID NO: 1251 - DNA, 20 bp, Homo sapiens
caccatggcccctccccggg

SEQ ID NO: 1252 - DNA, 20 bp, Homo sapiens
gcaccatggcccctccccgg

SEQ ID NO: 1253 - DNA, 20 bp, Homo sapiens
agcaccatggcccctccccg

SEQ ID NO: 1254 - DNA, 20 bp, Homo sapiens
cagcaccatggcccctcccc

SEQ ID NO: 1255 - DNA, 20 bp, Homo sapiens
gcagcaccatggcccctccc

SEQ ID NO: 1256 - DNA, 20 bp, Homo sapiens
ggcagcaccatggcccctcc

SEQ ID NO: 1257 - DNA, 20 bp, Homo sapiens
caggcagcaccatggcccct

SEQ ID NO: 1258 - DNA, 20 bp, Homo sapiens
acaggcagcaccatggcccc

SEQ ID NO: 1259 - DNA, 20 bp, Homo sapiens
ggacaggcagcaccatggcc

SEQ ID NO: 1260 - DNA, 20 bp, Homo sapiens
tggacaggcagcaccatggc

SEQ ID NO: 1261 - DNA, 20 bp, Homo sapiens
ttggacaggcagcaccatgg

SEQ ID NO: 1262 - DNA, 20 bp, Homo sapiens
gttggacaggcagcaccatg

SEQ ID NO: 1263 - DNA, 20 bp, Homo sapiens
tgttggacaggcagcaccat

SEQ ID NO: 1264 - DNA, 20 bp, Homo sapiens
atgttggacaggcagcacca

SEQ ID NO: 1265 - DNA, 20 bp, Homo sapiens
catgttggacaggcagcacc

SEQ ID NO: 1266 - DNA, 20 bp, Homo sapiens
acatgttggacaggcagcac

SEQ ID NO: 1267 - DNA, 20 bp, Homo sapiens
gacatgttggacaggcagca

SEQ ID NO: 1268 - DNA, 20 bp, Homo sapiens
tgacatgttggacaggcagc

SEQ ID NO: 1269 - DNA, 20 bp, Homo sapiens
ctgacatgttggacaggcag

SEQ ID NO: 1270 - DNA, 20 bp, Homo sapiens
gctgacatgttggacaggca

SEQ ID NO: 1271 - DNA, 20 bp, Homo sapiens
ggctgacatgttggacaggc

SEQ ID NO: 1272 - DNA, 20 bp, Homo sapiens
cggctgacatgttggacagg

SEQ ID NO: 1273 - DNA, 20 bp, Homo sapiens
tcggctgacatgttggacag

SEQ ID NO: 1274 - DNA, 20 bp, Homo sapiens
ctcggctgacatgttggaca

SEQ ID NO: 1275 - DNA, 20 bp, Homo sapiens
cctcggctgacatgttggac

SEQ ID NO: 1276 - DNA, 20 bp, Homo sapiens
acctcggctgacatgttgga

SEQ ID NO: 1277 - DNA, 20 bp, Homo sapiens
cacctcggctgacatgttgg

SEQ ID NO: 1278 - DNA, 20 bp, Homo sapiens
gcacctcggctgacatgttg

SEQ ID NO: 1279 - DNA, 20 bp, Homo sapiens
cgcacctcggctgacatgtt

SEQ ID NO: 1280 - DNA, 20 bp, Homo sapiens
ccgcacctcggctgacatgt

SEQ ID NO: 1281 - DNA, 20 bp, Homo sapiens
gccgcacctcggctgacatg

SEQ ID NO: 1282 - DNA, 20 bp, Homo sapiens
agccgcacctcggctgacat

SEQ ID NO: 1283 - DNA, 20 bp, Homo sapiens
cagccgcacctcggctgaca

SEQ ID NO: 1284 - DNA, 20 bp, Homo sapiens
tcagccgcacctcggctgac

SEQ ID NO: 1285 - DNA, 20 bp, Homo sapiens
ctcagccgcacctcggctga

SEQ ID NO: 1286 - DNA, 20 bp, Homo sapiens
cctcagccgcacctcggctg

SEQ ID NO: 1287 - DNA, 20 bp, Homo sapiens
gcctcagccgcacctcggct

SEQ ID NO: 1288 - DNA, 20 bp, Homo sapiens
ccaacaccagctgctggagc

SEQ ID NO: 1289 - DNA, 20 bp, Homo sapiens
tccaacaccagctgctggag

SEQ ID NO: 1290 - DNA, 20 bp, Homo sapiens
gtccaacaccagctgctgga

SEQ ID NO: 1291 - DNA, 20 bp, Homo sapiens
gggtccaacaccagctgctg

SEQ ID NO: 1292 - DNA, 20 bp, Homo sapiens
ggctccagccccaggaagcc

SEQ ID NO: 1293 - DNA, 20 bp, Homo sapiens
gggctccagccccaggaagc

SEQ ID NO: 1294 - DNA, 20 bp, Homo sapiens
caggagaaggtcgagcaggg

SEQ ID NO: 1295 - DNA, 20 bp, Homo sapiens
cccaggagaaggtcgagcag

SEQ ID NO: 1296 - DNA, 20 bp, Homo sapiens
gcccaggagaaggtcgagca

SEQ ID NO: 1297 - DNA, 20 bp, Homo sapiens
cgcccaggagaaggtcgagc

SEQ ID NO: 1298 - DNA, 20 bp, Homo sapiens
acgcccaggagaaggtcgag

SEQ ID NO: 1299 - DNA, 20 bp, Homo sapiens
tcctgggccagttcggaggc

SEQ ID NO: 1300 - DNA, 20 bp, Homo sapiens
gtcctgggccagttcggagg

SEQ ID NO: 1301 - DNA, 20 bp, Homo sapiens
tgtcctgggccagttcggag

SEQ ID NO: 1302 - DNA, 20 bp, Homo sapiens
ttgtcctgggccagttcgga

SEQ ID NO: 1303 - DNA, 20 bp, Homo sapiens
cttgtcctgggccagttcgg

SEQ ID NO: 1304 - DNA, 20 bp, Homo sapiens
acttgtcctgggccagttcg

SEQ ID NO: 1305 - DNA, 20 bp, Homo sapiens
tacttgtcctgggccagttc

SEQ ID NO: 1306 - DNA, 20 bp, Homo sapiens
gtacttgtcctgggccagtt

SEQ ID NO: 1307 - DNA, 20 bp, Homo sapiens
cgtacttgtcctgggccagt

SEQ ID NO: 1308 - DNA, 20 bp, Homo sapiens
actgcaagaagtcggccacg

SEQ ID NO: 1309 - DNA, 20 bp, Homo sapiens
ccactgcaagaagtcggcca

SEQ ID NO: 1310 - DNA, 20 bp, Homo sapiens
cccactgcaagaagtcggcc

SEQ ID NO: 1311 - DNA, 20 bp, Homo sapiens
gcccactgcaagaagtcggc

SEQ ID NO: 1312 - DNA, 20 bp, Homo sapiens
cgcccactgcaagaagtcgg

SEQ ID NO: 1313 - DNA, 20 bp, Homo sapiens
ccgcccactgcaagaagtcg

SEQ ID NO: 1314 - DNA, 20 bp, Homo sapiens
tccgcccactgcaagaagtc

SEQ ID NO: 1315 - DNA, 20 bp, Homo sapiens
ctccgcccactgcaagaagt

SEQ ID NO: 1316 - DNA, 20 bp, Homo sapiens
gctccgcccactgcaagaag

SEQ ID NO: 1317 - DNA, 20 bp, Homo sapiens
ggctccgcccactgcaagaa

SEQ ID NO: 1318 - DNA, 20 bp, Homo sapiens
gggctccgcccactgcaaga

SEQ ID NO: 1319 - DNA, 20 bp, Homo sapiens
tgggctccgcccactgcaag

SEQ ID NO: 1320 - DNA, 20 bp, Homo sapiens
atgggctccgcccactgcaa

SEQ ID NO: 1321 - DNA, 20 bp, Homo sapiens
gatgggctccgcccactgca

SEQ ID NO: 1322 - DNA, 20 bp, Homo sapiens
cgatgggctccgcccactgc

SEQ ID NO: 1323 - DNA, 20 bp, Homo sapiens
acgatgggctccgcccactg

SEQ ID NO: 1324 - DNA, 20 bp, Homo sapiens
cacgatgggctccgcccact

SEQ ID NO: 1325 - DNA, 20 bp, Homo sapiens
ccacgatgggctccgcccac

SEQ ID NO: 1326 - DNA, 20 bp, Homo sapiens
accacgatgggctccgccca

SEQ ID NO: 1327 - DNA, 20 bp, Homo sapiens
caccacgatgggctccgccc

SEQ ID NO: 1328 - DNA, 20 bp, Homo sapiens
tcaccacgatgggctccgcc

SEQ ID NO: 1329 - DNA, 20 bp, Homo sapiens
ctcaccacgatgggctccgc

SEQ ID NO: 1330 - DNA, 20 bp, Homo sapiens
cctcaccacgatgggctccg

SEQ ID NO: 1331 - DNA, 20 bp, Homo sapiens
gcctcaccacgatgggctcc

SEQ ID NO: 1332 - DNA, 20 bp, Homo sapiens
agcctcaccacgatgggctc

SEQ ID NO: 1333 - DNA, 20 bp, Homo sapiens
aagcctcaccacgatgggct

SEQ ID NO: 1334 - DNA, 20 bp, Homo sapiens
taagcctcaccacgatgggc

SEQ ID NO: 1335 - DNA, 20 bp, Homo sapiens
ttaagcctcaccacgatggg

SEQ ID NO: 1336 - DNA, 20 bp, Homo sapiens
cttaagcctcaccacgatgg

SEQ ID NO: 1337 - DNA, 20 bp, Homo sapiens
ccttaagcctcaccacgatg

SEQ ID NO: 1338 - DNA, 20 bp, Homo sapiens
tccttaagcctcaccacgat

SEQ ID NO: 1339 - DNA, 20 bp, Homo sapiens
ctccttaagcctcaccacga

SEQ ID NO: 1340 - DNA, 20 bp, Homo sapiens
cctccttaagcctcaccacg

SEQ ID NO: 1341 - DNA, 20 bp, Homo sapiens
acctccttaagcctcaccac

SEQ ID NO: 1342 - DNA, 20 bp, Homo sapiens
gacctccttaagcctcacca

SEQ ID NO: 1343 - DNA, 20 bp, Homo sapiens
ggacctccttaagcctcacc

SEQ ID NO: 1344 - DNA, 20 bp, Homo sapiens
cggacctccttaagcctcac

SEQ ID NO: 1345 - DNA, 20 bp, Homo sapiens
tcggacctccttaagcctca

SEQ ID NO: 1346 - DNA, 20 bp, Homo sapiens
gtcggacctccttaagcctc

SEQ ID NO: 1347 - DNA, 20 bp, Homo sapiens
cagtcggacctccttaagcc

SEQ ID NO: 1348 - DNA, 20 bp, Homo sapiens
gcagtcggacctccttaagc

SEQ ID NO: 1349 - DNA, 20 bp, Homo sapiens
tgcagtcggacctccttaag

SEQ ID NO: 1350 - DNA, 20 bp, Homo sapiens
ccttcagaatctcgaagtcg

SEQ ID NO: 1351 - DNA, 20 bp, Homo sapiens
accttcagaatctcgaagtc

SEQ ID NO: 1352 - DNA, 20 bp, Homo sapiens
tcaccttcagaatctcgaag

SEQ ID NO: 1353 - DNA, 20 bp, Homo sapiens
atcaccttcagaatctcgaa

SEQ ID NO: 1354 - DNA, 20 bp, Homo sapiens
gatcaccttcagaatctcga

SEQ ID NO: 1355 - DNA, 20 bp, Homo sapiens
ccgatcaccttcagaatctc

SEQ ID NO: 1356 - DNA, 20 bp, Homo sapiens
tccgatcaccttcagaatct

SEQ ID NO: 1357 - DNA, 20 bp, Homo sapiens
gtccgatcaccttcagaatc

SEQ ID NO: 1358 - DNA, 20 bp, Homo sapiens
cgtccgatcaccttcagaat

SEQ ID NO: 1359 - DNA, 20 bp, Homo sapiens
cccgtctgcttcatcttcac

SEQ ID NO: 1360 - DNA, 20 bp, Homo sapiens
gcccgtctgcttcatcttca

SEQ ID NO: 1361 - DNA, 20 bp, Homo sapiens
ggcccgtctgcttcatcttc

SEQ ID NO: 1362 - DNA, 20 bp, Homo sapiens
tggcccgtctgcttcatctt

SEQ ID NO: 1363 - DNA, 20 bp, Homo sapiens
ctggcccgtctgcttcatct

SEQ ID NO: 1364 - DNA, 20 bp, Homo sapiens
cctggcccgtctgcttcatc

SEQ ID NO: 1365 - DNA, 20 bp, Homo sapiens
acctggcccgtctgcttcat

SEQ ID NO: 1366 - DNA, 20 bp, Homo sapiens
cacctggcccgtctgcttca

SEQ ID NO: 1367 - DNA, 20 bp, Homo sapiens
acacctggcccgtctgcttc

SEQ ID NO: 1368 - DNA, 20 bp, Homo sapiens
tacacctggcccgtctgctt

SEQ ID NO: 1369 - DNA, 20 bp, Homo sapiens
ttgttcatgatcttcatggc

SEQ ID NO: 1370 - DNA, 20 bp, Homo sapiens
acttgttcatgatcttcatg

SEQ ID NO: 1371 - DNA, 20 bp, Homo sapiens
cacttgttcatgatcttcat

SEQ ID NO: 1372 - DNA, 20 bp, Homo sapiens
ccacttgttcatgatcttca

SEQ ID NO: 1373 - DNA, 20 bp, Homo sapiens
cccacttgttcatgatcttc

SEQ ID NO: 1374 - DNA, 20 bp, Homo sapiens
tcccacttgttcatgatctt

SEQ ID NO: 1375 - DNA, 20 bp, Homo sapiens
gtcccacttgttcatgatct

SEQ ID NO: 1376 - DNA, 20 bp, Homo sapiens
tgtcccacttgttcatgatc

SEQ ID NO: 1377 - DNA, 20 bp, Homo sapiens
atgtcccacttgttcatgat

SEQ ID NO: 1378 - DNA, 20 bp, Homo sapiens
catgtcccacttgttcatga

SEQ ID NO: 1379 - DNA, 20 bp, Homo sapiens
gcatgtcccacttgttcatg

SEQ ID NO: 1380 - DNA, 20 bp, Homo sapiens
agcatgtcccacttgttcat

SEQ ID NO: 1381 - DNA, 20 bp, Homo sapiens
cagcatgtcccacttgttca

SEQ ID NO: 1382 - DNA, 20 bp, Homo sapiens
tcagcatgtcccacttgttc

SEQ ID NO: 1383 - DNA, 20 bp, Homo sapiens
ttcagcatgtcccacttgtt

SEQ ID NO: 1384 - DNA, 20 bp, Homo sapiens
cttcagcatgtcccacttgt

SEQ ID NO: 1385 - DNA, 20 bp, Homo sapiens
tcttcagcatgtcccacttg

SEQ ID NO: 1386 - DNA, 20 bp, Homo sapiens
cctcttcagcatgtcccact

SEQ ID NO: 1387 - DNA, 20 bp, Homo sapiens
ccctcttcagcatgtcccac

SEQ ID NO: 1388 - DNA, 20 bp, Homo sapiens
cccctcttcagcatgtccca

SEQ ID NO: 1389 - DNA, 20 bp, Homo sapiens
gcccctcttcagcatgtccc

SEQ ID NO: 1390 - DNA, 20 bp, Homo sapiens
cgcccctcttcagcatgtcc

SEQ ID NO: 1391 - DNA, 20 bp, Homo sapiens
tcgcccctcttcagcatgtc

SEQ ID NO: 1392 - DNA, 20 bp, Homo sapiens
ctcgcccctcttcagcatgt

SEQ ID NO: 1393 - DNA, 20 bp, Homo sapiens
cctcgcccctcttcagcatg

SEQ ID NO: 1394 - DNA, 20 bp, Homo sapiens
acctcgcccctcttcagcat

SEQ ID NO: 1395 - DNA, 20 bp, Homo sapiens
cacctcgcccctcttcagca

SEQ ID NO: 1396 - DNA, 20 bp, Homo sapiens
acacctcgcccctcttcagc

SEQ ID NO: 1397 - DNA, 20 bp, Homo sapiens
gacacctcgcccctcttcag

SEQ ID NO: 1398 - DNA, 20 bp, Homo sapiens
gccaggcggatgtggccaca

SEQ ID NO: 1399 - DNA, 20 bp, Homo sapiens
accgcaccgttccatctgcc

SEQ ID NO: 1400 - DNA, 20 bp, Homo sapiens
gaccgcaccgttccatctgc

SEQ ID NO: 1401 - DNA, 20 bp, Homo sapiens
acagcctgcaggatctcggg

SEQ ID NO: 1402 - DNA, 20 bp, Homo sapiens
cacagcctgcaggatctcgg

SEQ ID NO: 1403 - DNA, 20 bp, Homo sapiens
ccacagcctgcaggatctcg

SEQ ID NO: 1404 - DNA, 20 bp, Homo sapiens
cccacagcctgcaggatctc

SEQ ID NO: 1405 - DNA, 20 bp, Homo sapiens
gcccacagcctgcaggatct

SEQ ID NO: 1406 - DNA, 20 bp, Homo sapiens
cgcccacagcctgcaggatc

SEQ ID NO: 1407 - DNA, 20 bp, Homo sapiens
ccgcccacagcctgcaggat

SEQ ID NO: 1408 - DNA, 20 bp, Homo sapiens
accgcccacagcctgcagga

SEQ ID NO: 1409 - DNA, 20 bp, Homo sapiens
caccgcccacagcctgcagg

SEQ ID NO: 1410 - DNA, 20 bp, Homo sapiens
ccaccgcccacagcctgcag

SEQ ID NO: 1411 - DNA, 20 bp, Homo sapiens
cccaccgcccacagcctgca

SEQ ID NO: 1412 - DNA, 20 bp, Homo sapiens
gcccaccgcccacagcctgc

SEQ ID NO: 1413 - DNA, 20 bp, Homo sapiens
ggcccaccgcccacagcctg

SEQ ID NO: 1414 - DNA, 20 bp, Homo sapiens
aggcccaccgcccacagcct

SEQ ID NO: 1415 - DNA, 20 bp, Homo sapiens
caggcccaccgcccacagcc

SEQ ID NO: 1416 - DNA, 20 bp, Homo sapiens
ccaggcccaccgcccacagc

SEQ ID NO: 1417 - DNA, 20 bp, Homo sapiens
cccaggcccaccgcccacag

SEQ ID NO: 1418 - DNA, 20 bp, Homo sapiens
tcccaggcccaccgcccaca

SEQ ID NO: 1419 - DNA, 20 bp, Homo sapiens
gtcccaggcccaccgcccac

SEQ ID NO: 1420 - DNA, 20 bp, Homo sapiens
tgtcccaggcccaccgccca

SEQ ID NO: 1421 - DNA, 20 bp, Homo sapiens
ctgtcccaggcccaccgccc

SEQ ID NO: 1422 - DNA, 20 bp, Homo sapiens
cctgtcccaggcccaccgcc

SEQ ID NO: 1423 - DNA, 20 bp, Homo sapiens
gcctgtcccaggcccaccgc

SEQ ID NO: 1424 - DNA, 20 bp, Homo sapiens
tgcctgtcccaggcccaccg

SEQ ID NO: 1425 - DNA, 20 bp, Homo sapiens
ctgcctgtcccaggcccacc

SEQ ID NO: 1426 - DNA, 20 bp, Homo sapiens
gctgcctgtcccaggcccac

SEQ ID NO: 1427 - DNA, 20 bp, Homo sapiens
agctgcctgtcccaggccca

SEQ ID NO: 1428 - DNA, 20 bp, Homo sapiens
tagctgcctgtcccaggccc

SEQ ID NO: 1429 - DNA, 20 bp, Homo sapiens
gtagctgcctgtcccaggcc

SEQ ID NO: 1430 - DNA, 20 bp, Homo sapiens
cgtagctgcctgtcccaggc

SEQ ID NO: 1431 - DNA, 20 bp, Homo sapiens
ccgtagctgcctgtcccagg

SEQ ID NO: 1432 - DNA, 20 bp, Homo sapiens
cccgtagctgcctgtcccag

SEQ ID NO: 1433 - DNA, 20 bp, Homo sapiens
gcccgtagctgcctgtccca

SEQ ID NO: 1434 - DNA, 20 bp, Homo sapiens
ggcccgtagctgcctgtccc

SEQ ID NO: 1435 - DNA, 20 bp, Homo sapiens
tagaacatttcataggcgaa

SEQ ID NO: 1436 - DNA, 20 bp, Homo sapiens
tctccgccgtggaatccgcg

SEQ ID NO: 1437 - DNA, 20 bp, Homo sapiens
gtctccgccgtggaatccgc

SEQ ID NO: 1438 - DNA, 20 bp, Homo sapiens
ggtctccgccgtggaatccg

SEQ ID NO: 1439 - DNA, 20 bp, Homo sapiens
aggtctccgccgtggaatcc

SEQ ID NO: 1440 - DNA, 20 bp, Homo sapiens
taggtctccgccgtggaatc

SEQ ID NO: 1441 - DNA, 20 bp, Homo sapiens
ttgtagtggacgatcttgcc

SEQ ID NO: 1442 - DNA, 20 bp, Homo sapiens
cttgtagtggacgatcttgc

SEQ ID NO: 1443 - DNA, 20 bp, Homo sapiens
ccttgtagtggacgatcttg

SEQ ID NO: 1444 - DNA, 20 bp, Homo sapiens
tccttgtagtggacgatctt

SEQ ID NO: 1445 - DNA, 20 bp, Homo sapiens
ctccttgtagtggacgatct

SEQ ID NO: 1446 - DNA, 20 bp, Homo sapiens
gctccttgtagtggacgatc

SEQ ID NO: 1447 - DNA, 20 bp, Homo sapiens
tgctccttgtagtggacgat

SEQ ID NO: 1448 - DNA, 20 bp, Homo sapiens
gtgctccttgtagtggacga

SEQ ID NO: 1449 - DNA, 20 bp, Homo sapiens
ggtgctccttgtagtggacg

SEQ ID NO: 1450 - DNA, 20 bp, Homo sapiens
aggtgctccttgtagtggac

SEQ ID NO: 1451 - DNA, 20 bp, Homo sapiens
gaggtgctccttgtagtgga

SEQ ID NO: 1452 - DNA, 20 bp, Homo sapiens
agaggtgctccttgtagtgg

SEQ ID NO: 1453 - DNA, 20 bp, Homo sapiens
gagaggtgctccttgtagtg

SEQ ID NO: 1454 - DNA, 20 bp, Homo sapiens
agagaggtgctccttgtagt

SEQ ID NO: 1455 - DNA, 20 bp, Homo sapiens
gagagaggtgctccttgtag

SEQ ID NO: 1456 - DNA, 20 bp, Homo sapiens
agagagaggtgctccttgta

SEQ ID NO: 1457 - DNA, 20 bp, Homo sapiens
cagagagaggtgctccttgt

SEQ ID NO: 1458 - DNA, 20 bp, Homo sapiens
ggcagagagaggtgctcctt

SEQ ID NO: 1459 - DNA, 20 bp, Homo sapiens
cggcagagagaggtgctcct

SEQ ID NO: 1460 - DNA, 20 bp, Homo sapiens
gcggcagagagaggtgctcc

SEQ ID NO: 1461 - DNA, 20 bp, Homo sapiens
agcggcagagagaggtgctc

SEQ ID NO: 1462 - DNA, 20 bp, Homo sapiens
cagcggcagagagaggtgct

SEQ ID NO: 1463 - DNA, 20 bp, Homo sapiens
ccagcggcagagagaggtgc

SEQ ID NO: 1464 - DNA, 20 bp, Homo sapiens
ggcccagccgtgtctccggg

SEQ ID NO: 1465 - DNA, 20 bp, Homo sapiens
cggcccagccgtgtctccgg

SEQ ID NO: 1466 - DNA, 20 bp, Homo sapiens
ccggcccagccgtgtctccg

SEQ ID NO: 1467 - DNA, 20 bp, Homo sapiens
cccggcccagccgtgtctcc

SEQ ID NO: 1468 - DNA, 20 bp, Homo sapiens
ccccggcccagccgtgtctc

SEQ ID NO: 1469 - DNA, 20 bp, Homo sapiens
accccggcccagccgtgtct

SEQ ID NO: 1470 - DNA, 20 bp, Homo sapiens
caccccggcccagccgtgtc

SEQ ID NO: 1471 - DNA, 20 bp, Homo sapiens
ccaccccggcccagccgtgt

SEQ ID NO: 1472 - DNA, 20 bp, Homo sapiens
tccaccccggcccagccgtg

SEQ ID NO: 1473 - DNA, 20 bp, Homo sapiens
ctccaccccggcccagccgt

SEQ ID NO: 1474 - DNA, 20 bp, Homo sapiens
gctccaccccggcccagccg

SEQ ID NO: 1475 - DNA, 20 bp, Homo sapiens
tgctccaccccggcccagcc

SEQ ID NO: 1476 - DNA, 20 bp, Homo sapiens
ctgctccaccccggcccagc

SEQ ID NO: 1477 - DNA, 20 bp, Homo sapiens
aagggatgtgtccggaagtc

SEQ ID NO: 1478 - DNA, 20 bp, Homo sapiens
gaagggatgtgtccggaagt

SEQ ID NO: 1479 - DNA, 20 bp, Homo sapiens
agaagggatgtgtccggaag

SEQ ID NO: 1480 - DNA, 20 bp, Homo sapiens
aagaagggatgtgtccggaa

SEQ ID NO: 1481 - DNA, 20 bp, Homo sapiens
gaagaagggatgtgtccgga

SEQ ID NO: 1482 - DNA, 20 bp, Homo sapiens
agaagaagggatgtgtccgg

SEQ ID NO: 1483 - DNA, 20 bp, Homo sapiens
aagaagaagggatgtgtccg

SEQ ID NO: 1484 - DNA, 20 bp, Homo sapiens
aaagaagaagggatgtgtcc

SEQ ID NO: 1485 - DNA, 20 bp, Homo sapiens
caaagaagaagggatgtgtc

SEQ ID NO: 1486 - DNA, 20 bp, Homo sapiens
ccaaagaagaagggatgtgt

SEQ ID NO: 1487 - DNA, 20 bp, Homo sapiens
ggccaaagaagaagggatgt

SEQ ID NO: 1488 - DNA, 20 bp, Homo sapiens
aggccaaagaagaagggatg

SEQ ID NO: 1489 - DNA, 20 bp, Homo sapiens
gaggccaaagaagaagggat

SEQ ID NO: 1490 - DNA, 20 bp, Homo sapiens
cgaggccaaagaagaaggga

SEQ ID NO: 1491 - DNA, 20 bp, Homo sapiens
tcgaggccaaagaagaaggg

SEQ ID NO: 1492 - DNA, 20 bp, Homo sapiens
gtcgaggccaaagaagaagg

SEQ ID NO: 1493 - DNA, 20 bp, Homo sapiens
agtcgaggccaaagaagaag

SEQ ID NO: 1494 - DNA, 20 bp, Homo sapiens
cagtcgaggccaaagaagaa

SEQ ID NO: 1495 - DNA, 20 bp, Homo sapiens
ccagtcgaggccaaagaaga

SEQ ID NO: 1496 - DNA, 20 bp, Homo sapiens
cccagtcgaggccaaagaag

SEQ ID NO: 1497 - DNA, 20 bp, Homo sapiens
tcccagtcgaggccaaagaa

SEQ ID NO: 1498 - DNA, 20 bp, Homo sapiens
atcccagtcgaggccaaaga

SEQ ID NO: 1499 - DNA, 20 bp, Homo sapiens
catcccagtcgaggccaaag

SEQ ID NO: 1500 - DNA, 20 bp, Homo sapiens
ccatcccagtcgaggccaaa

SEQ ID NO: 1501 - DNA, 20 bp, Homo sapiens
accatcccagtcgaggccaa

SEQ ID NO: 1502 - DNA, 20 bp, Homo sapiens
gaccatcccagtcgaggcca

SEQ ID NO: 1503 - DNA, 20 bp, Homo sapiens
agaccatcccagtcgaggcc

SEQ ID NO: 1504 - DNA, 20 bp, Homo sapiens
gagaccatcccagtcgaggc

SEQ ID NO: 1505 - DNA, 20 bp, Homo sapiens
ggagaccatcccagtcgagg

SEQ ID NO: 1506 - DNA, 20 bp, Homo sapiens
ttcgaaatccggtgtaaagg

SEQ ID NO: 1507 - DNA, 20 bp, Homo sapiens
cttcgaaatccggtgtaaag

SEQ ID NO: 1508 - DNA, 20 bp, Homo sapiens
ccttcgaaatccggtgtaaa

SEQ ID NO: 1509 - DNA, 20 bp, Homo sapiens
accttcgaaatccggtgtaa

SEQ ID NO: 1510 - DNA, 20 bp, Homo sapiens
caccttcgaaatccggtgta

SEQ ID NO: 1511 - DNA, 20 bp, Homo sapiens
gcaccttcgaaatccggtgt

SEQ ID NO: 1512 - DNA, 20 bp, Homo sapiens
ggcaccttcgaaatccggtg

SEQ ID NO: 1513 - DNA, 20 bp, Homo sapiens
tggcaccttcgaaatccggt

SEQ ID NO: 1514 - DNA, 20 bp, Homo sapiens
gtggcaccttcgaaatccgg

SEQ ID NO: 1515 - DNA, 20 bp, Homo sapiens
ggtggcaccttcgaaatccg

SEQ ID NO: 1516 - DNA, 20 bp, Homo sapiens
cggtggcaccttcgaaatcc

SEQ ID NO: 1517 - DNA, 20 bp, Homo sapiens
tcggtggcaccttcgaaatc

SEQ ID NO: 1518 - DNA, 20 bp, Homo sapiens
gtcggtggcaccttcgaaat

SEQ ID NO: 1519 - DNA, 20 bp, Homo sapiens
tgtcggtggcaccttcgaaa

SEQ ID NO: 1520 - DNA, 20 bp, Homo sapiens
gtgtcggtggcaccttcgaa

SEQ ID NO: 1521 - DNA, 20 bp, Homo sapiens
tgtgtcggtggcaccttcga

SEQ ID NO: 1522 - DNA, 20 bp, Homo sapiens
atgtgtcggtggcaccttcg

SEQ ID NO: 1523 - DNA, 20 bp, Homo sapiens
catgtgtcggtggcaccttc

SEQ ID NO: 1524 - DNA, 20 bp, Homo sapiens
gcatgtgtcggtggcacctt

SEQ ID NO: 1525 - DNA, 20 bp, Homo sapiens
tgcatgtgtcggtggcacct

SEQ ID NO: 1526 - DNA, 20 bp, Homo sapiens
ttgcatgtgtcggtggcacc

SEQ ID NO: 1527 - DNA, 20 bp, Homo sapiens
gttgcatgtgtcggtggcac

SEQ ID NO: 1528 - DNA, 20 bp, Homo sapiens
agttgcatgtgtcggtggca

SEQ ID NO: 1529 - DNA, 20 bp, Homo sapiens
aagttgcatgtgtcggtggc

SEQ ID NO: 1530 - DNA, 20 bp, Homo sapiens
gaagttgcatgtgtcggtgg

SEQ ID NO: 1531 - DNA, 20 bp, Homo sapiens
cgaagttgcatgtgtcggtg

SEQ ID NO: 1532 - DNA, 20 bp, Homo sapiens
gtcgaagttgcatgtgtcgg

SEQ ID NO: 1533 - DNA, 20 bp, Homo sapiens
agtcgaagttgcatgtgtcg

SEQ ID NO: 1534 - DNA, 20 bp, Homo sapiens
aagtcgaagttgcatgtgtc

SEQ ID NO: 1535 - DNA, 20 bp, Homo sapiens
caagtcgaagttgcatgtgt

SEQ ID NO: 1536 - DNA, 20 bp, Homo sapiens
ccaagtcgaagttgcatgtg

SEQ ID NO: 1537 - DNA, 20 bp, Homo sapiens
accaagtcgaagttgcatgt

SEQ ID NO: 1538 - DNA, 20 bp, Homo sapiens
caccaagtcgaagttgcatg

SEQ ID NO: 1539 - DNA, 20 bp, Homo sapiens
ccaccaagtcgaagttgcat

SEQ ID NO: 1540 - DNA, 20 bp, Homo sapiens
tccaccaagtcgaagttgca

SEQ ID NO: 1541 - DNA, 20 bp, Homo sapiens
ctccaccaagtcgaagttgc

SEQ ID NO: 1542 - DNA, 20 bp, Homo sapiens
cctccaccaagtcgaagttg

SEQ ID NO: 1543 - DNA, 20 bp, Homo sapiens
tcctccaccaagtcgaagtt

SEQ ID NO: 1544 - DNA, 20 bp, Homo sapiens
gtcctccaccaagtcgaagt

SEQ ID NO: 1545 - DNA, 20 bp, Homo sapiens
cgtcctccaccaagtcgaag

SEQ ID NO: 1546 - DNA, 20 bp, Homo sapiens
ccgtcctccaccaagtcgaa

SEQ ID NO: 1547 - DNA, 20 bp, Homo sapiens
cccgtcctccaccaagtcga

SEQ ID NO: 1548 - DNA, 20 bp, Homo sapiens
gcccgtcctccaccaagtcg

SEQ ID NO: 1549 - DNA, 20 bp, Homo sapiens
agcccgtcctccaccaagtc

SEQ ID NO: 1550 - DNA, 20 bp, Homo sapiens
gagcccgtcctccaccaagt

SEQ ID NO: 1551 - DNA, 20 bp, Homo sapiens
tgagcccgtcctccaccaag

SEQ ID NO: 1552 - DNA, 20 bp, Homo sapiens
ggttccgagcctctgcctcg

SEQ ID NO: 1553 - DNA, 20 bp, Homo sapiens
cggttccgagcctctgcctc

SEQ ID NO: 1554 - DNA, 20 bp, Homo sapiens
ccggttccgagcctctgcct

SEQ ID NO: 1555 - DNA, 20 bp, Homo sapiens
cccggttccgagcctctgcc

SEQ ID NO: 1556 - DNA, 20 bp, Homo sapiens
tcccggttccgagcctctgc

SEQ ID NO: 1557 - DNA, 20 bp, Homo sapiens
gtcccggttccgagcctctg

SEQ ID NO: 1558 - DNA, 20 bp, Homo sapiens
aggtcccggttccgagcctc

SEQ ID NO: 1559 - DNA, 20 bp, Homo sapiens
taggtcccggttccgagcct

SEQ ID NO: 1560 - DNA, 20 bp, Homo sapiens
ctaggtcccggttccgagcc

SEQ ID NO: 1561 - DNA, 20 bp, Homo sapiens
tctaggtcccggttccgagc

SEQ ID NO: 1562 - DNA, 20 bp, Homo sapiens
ctctaggtcccggttccgag

SEQ ID NO: 1563 - DNA, 20 bp, Homo sapiens
cctctaggtcccggttccga

SEQ ID NO: 1564 - DNA, 20 bp, Homo sapiens
gcctctaggtcccggttccg

SEQ ID NO: 1565 - DNA, 20 bp, Homo sapiens
catccgctcctgcaactgcc

SEQ ID NO: 1566 - DNA, 20 bp, Homo sapiens
ccatccgctcctgcaactgc

SEQ ID NO: 1567 - DNA, 20 bp, Homo sapiens
tccatccgctcctgcaactg

SEQ ID NO: 1568 - DNA, 20 bp, Homo sapiens
ctccatccgctcctgcaact

SEQ ID NO: 1569 - DNA, 20 bp, Homo sapiens
actccatccgctcctgcaac

SEQ ID NO: 1570 - DNA, 20 bp, Homo sapiens
aactccatccgctcctgcaa

SEQ ID NO: 1571 - DNA, 20 bp, Homo sapiens
caactccatccgctcctgca

SEQ ID NO: 1572 - DNA, 20 bp, Homo sapiens
agcaactccatccgctcctg

SEQ ID NO: 1573 - DNA, 20 bp, Homo sapiens
cagcaactccatccgctcct

SEQ ID NO: 1574 - DNA, 20 bp, Homo sapiens
gcagcaactccatccgctcc

SEQ ID NO: 1575 - DNA, 20 bp, Homo sapiens
cagctgtggctccctctgcc

SEQ ID NO: 1576 - DNA, 20 bp, Homo sapiens
acagctgtggctccctctgc

SEQ ID NO: 1577 - DNA, 20 bp, Homo sapiens
gacagctgtggctccctctg

SEQ ID NO: 1578 - DNA, 20 bp, Homo sapiens
tgacagctgtggctccctct

SEQ ID NO: 1579 - DNA, 20 bp, Homo sapiens
gtgacagctgtggctccctc

SEQ ID NO: 1580 - DNA, 20 bp, Homo sapiens
cgtgacagctgtggctccct

SEQ ID NO: 1581 - DNA, 20 bp, Homo sapiens
ccgtgacagctgtggctccc

SEQ ID NO: 1582 - DNA, 20 bp, Homo sapiens
cccgtgacagctgtggctcc

SEQ ID NO: 1583 - DNA, 20 bp, Homo sapiens
ccccgtgacagctgtggctc

SEQ ID NO: 1584 - DNA, 20 bp, Homo sapiens
cccccgtgacagctgtggct

SEQ ID NO: 1585 - DNA, 20 bp, Homo sapiens
acccccgtgacagctgtggc

SEQ ID NO: 1586 - DNA, 20 bp, Homo sapiens
gacccccgtgacagctgtgg

SEQ ID NO: 1587 - DNA, 20 bp, Homo sapiens
ggacccccgtgacagctgtg

SEQ ID NO: 1588 - DNA, 20 bp, Homo sapiens
gggacccccgtgacagctgt

SEQ ID NO: 1589 - DNA, 20 bp, Homo sapiens
gaaggtggatccgtggcccg

SEQ ID NO: 1590 - DNA, 20 bp, Homo sapiens
ggaaggtggatccgtggccc

SEQ ID NO: 1591 - DNA, 20 bp, Homo sapiens
gggaaggtggatccgtggcc

SEQ ID NO: 1592 - DNA, 20 bp, Homo sapiens
tgggaaggtggatccgtggc

SEQ ID NO: 1593 - DNA, 20 bp, Homo sapiens
atgggaaggtggatccgtgg

SEQ ID NO: 1594 - DNA, 20 bp, Homo sapiens
gatgggaaggtggatccgtg

SEQ ID NO: 1595 - DNA, 20 bp, Homo sapiens
tagatgggaaggtggatccg

SEQ ID NO: 1596 - DNA, 20 bp, Homo sapiens
ctagatgggaaggtggatcc

SEQ ID NO: 1597 - DNA, 20 bp, Homo sapiens
tctagatgggaaggtggatc

SEQ ID NO: 1598 - DNA, 20 bp, Homo sapiens
atctagatgggaaggtggat

SEQ ID NO: 1599 - DNA, 20 bp, Homo sapiens
ccatctagatgggaaggtgg

SEQ ID NO: 1600 - DNA, 20 bp, Homo sapiens
gccatctagatgggaaggtg

SEQ ID NO: 1601 - DNA, 20 bp, Homo sapiens
ggccatctagatgggaaggt

SEQ ID NO: 1602 - DNA, 20 bp, Homo sapiens
caccagcgggcactggccca

SEQ ID NO: 1603 - DNA, 20 bp, Homo sapiens
ccaccagcgggcactggccc

SEQ ID NO: 1604 - DNA, 20 bp, Homo sapiens
cccaccagcgggcactggcc

SEQ ID NO: 1605 - DNA, 20 bp, Homo sapiens
ccccaccagcgggcactggc

SEQ ID NO: 1606 - DNA, 20 bp, Homo sapiens
ggccccaccagcgggcactg

SEQ ID NO: 1607 - DNA, 20 bp, Homo sapiens
tggccccaccagcgggcact

SEQ ID NO: 1608 - DNA, 20 bp, Homo sapiens
ctggccccaccagcgggcac

SEQ ID NO: 1609 - DNA, 20 bp, Homo sapiens
cctggccccaccagcgggca

SEQ ID NO: 1610 - DNA, 20 bp, Homo sapiens
gcctggccccaccagcgggc

SEQ ID NO: 1611 - DNA, 20 bp, Homo sapiens
gggcctggccccaccagcgg

SEQ ID NO: 1612 - DNA, 20 bp, Homo sapiens
aggtggcggcggtgcatggg

SEQ ID NO: 1613 - DNA, 20 bp, Homo sapiens
caggtggcggcggtgcatgg

SEQ ID NO: 1614 - DNA, 20 bp, Homo sapiens
gcaggtggcggcggtgcatg

SEQ ID NO: 1615 - DNA, 20 bp, Homo sapiens
agcaggtggcggcggtgcat

SEQ ID NO: 1616 - DNA, 20 bp, Homo sapiens
cagcaggtggcggcggtgca

SEQ ID NO: 1617 - DNA, 20 bp, Homo sapiens
gcagcaggtggcggcggtgc

SEQ ID NO: 1618 - DNA, 20 bp, Homo sapiens
agcagcaggtggcggcggtg

SEQ ID NO: 1619 - DNA, 20 bp, Homo sapiens
gagcagcaggtggcggcggt

SEQ ID NO: 1620 - DNA, 20 bp, Homo sapiens
ggagcagcaggtggcggcgg

SEQ ID NO: 1621 - DNA, 20 bp, Homo sapiens
gggagcagcaggtggcggcg

SEQ ID NO: 1622 - DNA, 20 bp, Homo sapiens
agggagcagcaggtggcggc

SEQ ID NO: 1623 - DNA, 20 bp, Homo sapiens
cagggagcagcaggtggcgg

SEQ ID NO: 1624 - DNA, 20 bp, Homo sapiens
gcagggagcagcaggtggcg

SEQ ID NO: 1625 - DNA, 20 bp, Homo sapiens
ggcagggagcagcaggtggc

SEQ ID NO: 1626 - DNA, 20 bp, Homo sapiens
tggcagggagcagcaggtgg

SEQ ID NO: 1627 - DNA, 20 bp, Homo sapiens
ctggcagggagcagcaggtg

SEQ ID NO: 1628 - DNA, 20 bp, Homo sapiens
ccctggcagggagcagcagg

SEQ ID NO: 1629 - DNA, 20 bp, Homo sapiens
accctggcagggagcagcag

SEQ ID NO: 1630 - DNA, 20 bp, Homo sapiens
gaccctggcagggagcagca

SEQ ID NO: 1631 - DNA, 20 bp, Homo sapiens
ggaccctggcagggagcagc

SEQ ID NO: 1632 - DNA, 20 bp, Homo sapiens
ggcctagggaccctggcagg

SEQ ID NO: 1633 - DNA, 20 bp, Homo sapiens
aggcctagggaccctggcag

SEQ ID NO: 1634 - DNA, 20 bp, Homo sapiens
ccaggcctagggaccctggc

SEQ ID NO: 1635 - DNA, 20 bp, Homo sapiens
gccaggcctagggaccctgg

SEQ ID NO: 1636 - DNA, 20 bp, Homo sapiens
ggccaggcctagggaccctg

SEQ ID NO: 1637 - DNA, 20 bp, Homo sapiens
aggccaggcctagggaccct

SEQ ID NO: 1638 - DNA, 20 bp, Homo sapiens
taggccaggcctagggaccc

SEQ ID NO: 1639 - DNA, 20 bp, Homo sapiens
ataggccaggcctagggacc

SEQ ID NO: 1640 - DNA, 20 bp, Homo sapiens
gataggccaggcctagggac

SEQ ID NO: 1641 - DNA, 20 bp, Homo sapiens
cgataggccaggcctaggga

SEQ ID NO: 1642 - DNA, 20 bp, Homo sapiens
ccgataggccaggcctaggg

SEQ ID NO: 1643 - DNA, 20 bp, Homo sapiens
tccgataggccaggcctagg

SEQ ID NO: 1644 - DNA, 20 bp, Homo sapiens
ctccgataggccaggcctag

SEQ ID NO: 1645 - DNA, 20 bp, Homo sapiens
cctccgataggccaggccta

SEQ ID NO: 1646 - DNA, 20 bp, Homo sapiens
gcctccgataggccaggcct

SEQ ID NO: 1647 - DNA, 20 bp, Homo sapiens
gcgcctccgataggccaggc

SEQ ID NO: 1648 - DNA, 20 bp, Homo sapiens
aacaggagcagggaaagcgc

SEQ ID NO: 1649 - DNA, 20 bp, Homo sapiens
gaacaggagcagggaaagcg

SEQ ID NO: 1650 - DNA, 20 bp, Homo sapiens
cgaacaggagcagggaaagc

SEQ ID NO: 1651 - DNA, 20 bp, Homo sapiens
gcgaacaggagcagggaaag

SEQ ID NO: 1652 - DNA, 20 bp, Homo sapiens
ggcgaacaggagcagggaaa

SEQ ID NO: 1653 - DNA, 20 bp, Homo sapiens
cggcgaacaggagcagggaa

SEQ ID NO: 1654 - DNA, 20 bp, Homo sapiens
acggcgaacaggagcaggga

SEQ ID NO: 1655 - DNA, 20 bp, Homo sapiens
aacggcgaacaggagcaggg

SEQ ID NO: 1656 - DNA, 20 bp, Homo sapiens
caacggcgaacaggagcagg

SEQ ID NO: 1657 - DNA, 20 bp, Homo sapiens
gggcggcggcacgagacaga

SEQ ID NO: 1658 - DNA, 20 bp, Homo sapiens
agggcggcggcacgagacag

SEQ ID NO: 1659 - DNA, 20 bp, Homo sapiens
cagggcggcggcacgagaca

SEQ ID NO: 1660 - DNA, 20 bp, Homo sapiens
ccagggcggcggcacgagac

SEQ ID NO: 1661 - DNA, 20 bp, Homo sapiens
cccagggcggcggcacgaga

SEQ ID NO: 1662 - DNA, 20 bp, Homo sapiens
gcccagggcggcggcacgag

SEQ ID NO: 1663 - DNA, 20 bp, Homo sapiens
agcccagggcggcggcacga

SEQ ID NO: 1664 - DNA, 20 bp, Homo sapiens
cagcccagggcggcggcacg

SEQ ID NO: 1665 - DNA, 20 bp, Homo sapiens
gcagcccagggcggcggcac

SEQ ID NO: 1666 - DNA, 20 bp, Homo sapiens
ctgcggtgagttggccggcg

SEQ ID NO: 1667 - DNA, 20 bp, Homo sapiens
actgcggtgagttggccggc

SEQ ID NO: 1668 - DNA, 20 bp, Homo sapiens
gactgcggtgagttggccgg

SEQ ID NO: 1669 - DNA, 20 bp, Homo sapiens
agactgcggtgagttggccg

SEQ ID NO: 1670 - DNA, 20 bp, Homo sapiens
cagactgcggtgagttggcc

SEQ ID NO: 1671 - DNA, 20 bp, Homo sapiens
ccagactgcggtgagttggc

SEQ ID NO: 1672 - DNA, 20 bp, Homo sapiens
gccagactgcggtgagttgg

SEQ ID NO: 1673 - DNA, 20 bp, Homo sapiens
cgccagactgcggtgagttg

SEQ ID NO: 1674 - DNA, 20 bp, Homo sapiens
aagacagttctagggttcag

SEQ ID NO: 1675 - DNA, 20 bp, Homo sapiens
gaagacagttctagggttca

SEQ ID NO: 1676 - DNA, 20 bp, Homo sapiens
cgaagacagttctagggttc

SEQ ID NO: 1677 - DNA, 20 bp, Homo sapiens
tcgaagacagttctagggtt

SEQ ID NO: 1678 - DNA, 20 bp, Homo sapiens
gtcgaagacagttctagggt

SEQ ID NO: 1679 - DNA, 20 bp, Homo sapiens
agtcgaagacagttctaggg

SEQ ID NO: 1680 - DNA, 20 bp, Homo sapiens
gagtcgaagacagttctagg

SEQ ID NO: 1681 - DNA, 20 bp, Homo sapiens
ggagtcgaagacagttctag

SEQ ID NO: 1682 - DNA, 20 bp, Homo sapiens
cggagtcgaagacagttcta

SEQ ID NO: 1683 - DNA, 20 bp, Homo sapiens
ccggagtcgaagacagttct

SEQ ID NO: 1684 - DNA, 20 bp, Homo sapiens
cccggagtcgaagacagttc

SEQ ID NO: 1685 - DNA, 20 bp, Homo sapiens
ccccggagtcgaagacagtt

SEQ ID NO: 1686 - DNA, 20 bp, Homo sapiens
gccccggagtcgaagacagt

SEQ ID NO: 1687 - DNA, 20 bp, Homo sapiens
ggccccggagtcgaagacag

SEQ ID NO: 1688 - DNA, 20 bp, Homo sapiens
gggccccggagtcgaagaca

SEQ ID NO: 1689 - DNA, 20 bp, Homo sapiens
aggcggtgggcgcggcttct

SEQ ID NO: 1690 - DNA, 20 bp, Homo sapiens
caggcggtgggcgcggcttc

SEQ ID NO: 1691 - DNA, 20 bp, Homo sapiens
gcaggcggtgggcgcggctt

SEQ ID NO: 1692 - DNA, 20 bp, Homo sapiens
tggcaggcggtgggcgcggc

SEQ ID NO: 1693 - DNA, 20 bp, Homo sapiens
actggcaggcggtgggcgcg

SEQ ID NO: 1694 - DNA, 20 bp, Homo sapiens
gaactggcaggcggtgggcg

SEQ ID NO: 1695 - DNA, 20 bp, Homo sapiens
tgaactggcaggcggtgggc

SEQ ID NO: 1696 - DNA, 20 bp, Homo sapiens
tgtgaactggcaggcggtgg

SEQ ID NO: 1697 - DNA, 20 bp, Homo sapiens
tggagctgggcggagaccca

SEQ ID NO: 1698 - DNA, 20 bp, Homo sapiens
actggagctgggcggagacc

SEQ ID NO: 1699 - DNA, 20 bp, Homo sapiens
gactggagctgggcggagac

SEQ ID NO: 1700 - DNA, 20 bp, Homo sapiens
aggactggagctgggcggag

SEQ ID NO: 1701 - DNA, 20 bp, Homo sapiens
acaggactggagctgggcgg

SEQ ID NO: 1702 - DNA, 20 bp, Homo sapiens
cacaggactggagctgggcg

SEQ ID NO: 1703 - DNA, 20 bp, Homo sapiens
tcacaggactggagctgggc

SEQ ID NO: 1704 - DNA, 20 bp, Homo sapiens
gcctcagcctggccgaaaga

SEQ ID NO: 1705 - DNA, 20 bp, Homo sapiens
ggcctcagcctggccgaaag

SEQ ID NO: 1706 - DNA, 20 bp, Homo sapiens
accccactgcaagaagtcgg

SEQ ID NO: 1707 - DNA, 20 bp, Homo sapiens
gccccaggatgggaggatct

SEQ ID NO: 1708 - DNA, 20 bp, Homo sapiens
cataggacagagaaatgttg

SEQ ID NO: 1709 - DNA, 20 bp, Homo sapiens
tgctgaccttactctgcccc

SEQ ID NO: 1710 - DNA, 20 bp, Homo sapiens
taagccatggctctgagtca

SEQ ID NO: 1711 - DNA, 20 bp, Homo sapiens
agagaggccatgggaggctg

SEQ ID NO: 1712 - DNA, 20 bp, Homo sapiens
ctggccctcctggcttgccc

SEQ ID NO: 1713 - DNA, 20 bp, Homo sapiens
agctgccccatgctggccct

SEQ ID NO: 1714 - DNA, 20 bp, Homo sapiens
gcccctggcagctgccccat

SEQ ID NO: 1715 - DNA, 20 bp, Homo sapiens
ctgtcggctgcgcccctggc

SEQ ID NO: 1716 - DNA, 20 bp, Homo sapiens
cgccgaacacctgcctgtcg

SEQ ID NO: 1717 - DNA, 20 bp, Homo sapiens
cctcccagtgcctgggcacc

SEQ ID NO: 1718 - DNA, 20 bp, Homo sapiens
gcgcctgtctgcaaagctgg

SEQ ID NO: 1719 - DNA, 20 bp, Homo sapiens
cccaaagttgtccctcctgg

SEQ ID NO: 1720 - DNA, 20 bp, Homo sapiens
acacccagaagaacccaaag

SEQ ID NO: 1721 - DNA, 20 bp, Homo sapiens
ctgacccacacggctcatag

SEQ ID NO: 1722 - DNA, 20 bp, Homo sapiens
tggccccaggccctggaaag

SEQ ID NO: 1723 - DNA, 20 bp, Homo sapiens
gacaaggcagctggcagaag

SEQ ID NO: 1724 - DNA, 20 bp, Homo sapiens
aagaaaccagtgaccagtga

SEQ ID NO: 1725 - DNA, 20 bp, Homo sapiens
ctgtgaaatgggaggaggag

SEQ ID NO: 1726 - DNA, 20 bp, Homo sapiens
gaaggtttttccagaggctg

SEQ ID NO: 1727 - DNA, 20 bp, Homo sapiens
ggccaggagagtcattaggg

SEQ ID NO: 1728 - DNA, 20 bp, Homo sapiens
ccacaaaaggagtgctcctc

SEQ ID NO: 1729 - DNA, 20 bp, Homo sapiens
ccttttaaggcagcaggaac

SEQ ID NO: 1730 - DNA, 20 bp, Homo sapiens
ctaggactgtctgcttccca

SEQ ID NO: 1731 - DNA, 20 bp, Homo sapiens
gtcattcatcaatttctaag

SEQ ID NO: 1732 - DNA, 20 bp, Homo sapiens
ggaggagctgcagccggaga

SEQ ID NO: 1733 - DNA, 20 bp, Homo sapiens
gcacccggaggagctgcagc

SEQ ID NO: 1734 - DNA, 20 bp, Homo sapiens
gcacgacacctgcagggcac

SEQ ID NO: 1735 - DNA, 20 bp, Homo sapiens
agctcaccaggtagttctca

SEQ ID NO: 1736 - DNA, 20 bp, Homo sapiens
gcttcctctccccacctcct

SEQ ID NO: 1737 - DNA, 20 bp, Homo sapiens
gcagcacccccaatcctaga

SEQ ID NO: 1738 - DNA, 20 bp, Homo sapiens
gcccctcatccacctgacac

SEQ ID NO: 1739 - DNA, 20 bp, Homo sapiens
ttccaggtaagagacccccc

SEQ ID NO: 1740 - DNA, 20 bp, Homo sapiens
agaataggtcccagacactc

SEQ ID NO: 1741 - DNA, 20 bp, Homo sapiens
ctccccctgagatgttctgg

SEQ ID NO: 1742 - DNA, 20 bp, Homo sapiens
ccccagcccagagataacca

SEQ ID NO: 1743 - DNA, 20 bp, Homo sapiens
cctgatccatcacggatggc

SEQ ID NO: 1744 - DNA, 20 bp, Homo sapiens
tactccatgaccaggtactg

SEQ ID NO: 1745 - DNA, 20 bp, Homo sapiens
gctctgaccttccaagaacc

SEQ ID NO: 1746 - DNA, 20 bp, Homo sapiens
ctcccttctgtggtcccacc

SEQ ID NO: 1747 - DNA, 20 bp, Homo sapiens
gtcgggtttgatgtccctgc

SEQ ID NO: 1748 - DNA, 20 bp, Homo sapiens
agggcactggctcaccgttc

SEQ ID NO: 1749 - DNA, 20 bp, Homo sapiens
gggccctccttccaaccact

SEQ ID NO: 1750 - DNA, 20 bp, Homo sapiens
gcccacccctctgggcccac

SEQ ID NO: 1751 - DNA, 20 bp, Homo sapiens
aggagcagagcgaggcttgg

SEQ ID NO: 1752 - DNA, 20 bp, Homo sapiens
caccttgtagtggacgatct

SEQ ID NO: 1753 - DNA, 20 bp, Homo sapiens
ctaccccgcccccgctcacc

SEQ ID NO: 1754 - DNA, 20 bp, Homo sapiens
ctaggtcactgctgggtcct

SEQ ID NO: 1755 - DNA, 20 bp, Homo sapiens
ctcagatagctccccactcc

SEQ ID NO: 1756 - DNA, 20 bp, Homo sapiens
aattctctaattctctagac

SEQ ID NO: 1757 - DNA, 20 bp, Homo sapiens
tacctgagggccatgcagga

SEQ ID NO: 1758 - DNA, 20 bp, Homo sapiens
gttccaagactgatcctgca

SEQ ID NO: 1759 - DNA, 20 bp, Homo sapiens
aggagggcggtggcgcggcg

SEQ ID NO: 1760 - DNA, 20 bp, Homo sapiens
tgacagctggaaggagaaga

SEQ ID NO: 1761 - DNA, 20 bp, Homo sapiens
catgggaaggtggatccgtg

SEQ ID NO: 1762 - DNA, 20 bp, Homo sapiens
ggaggttatctagggagatc

SEQ ID NO: 1763 - DNA, 20 bp, Homo sapiens
gaagggacaggtgacccgat

SEQ ID NO: 1764 - DNA, 20 bp, Homo sapiens
cgtaccctggcagggagcag

SEQ ID NO: 1765 - DNA, 20 bp, Homo sapiens
ggactcgccccgcctacgcc

SEQ ID NO: 1766 - DNA, 20 bp, Homo sapiens
ctcctgggactcgccccgcc

SEQ ID NO: 1767 - DNA, 20 bp, Homo sapiens
gctcctgggactcgccccgc

SEQ ID NO: 1768 - DNA, 20 bp, Homo sapiens
attggctcctgggactcgcc

SEQ ID NO: 1769 - DNA, 20 bp, Homo sapiens
gattggctcctgggactcgc

SEQ ID NO: 1770 - DNA, 20 bp, Homo sapiens
gcctctgattggctcctggg

SEQ ID NO: 1771 - DNA, 20 bp, Homo sapiens
gcatgggcctctgattggct

SEQ ID NO: 1772 - DNA, 20 bp, Homo sapiens
cacccggcatgggcctctga

SEQ ID NO: 1773 - DNA, 20 bp, Homo sapiens
gccaggcctagggacctgcg

SEQ ID NO: 1774 - DNA, 20 bp, Homo sapiens
cttctgcacgcctccgtctc

SEQ ID NO: 1775 - DNA, 20 bp, Homo sapiens
tggcccacagccacggccgg

SEQ ID NO: 1776 - DNA, 20 bp, Homo sapiens
ggcctggccccaccagcggg

SEQ ID NO: 1777 - DNA, 20 bp, Homo sapiens
cctggcagggagcagcaggt

SEQ ID NO: 1778 - DNA, 20 bp, Homo sapiens
gtctatggccatgacaatct

SEQ ID NO: 1779 - DNA, 20 bp, Homo sapiens
gggtgcccacagccaccagc

SEQ ID NO: 1780 - DNA, 20 bp, Homo sapiens
ccccgctcaccatggcagtg

SEQ ID NO: 1781 - DNA, 20 bp, Homo sapiens
ataaataccgaggaatgtcg

SEQ ID NO: 1782 - DNA, 20 bp, Homo sapiens
gggacagacaataaataccg

SEQ ID NO: 1783 - DNA, 20 bp, Homo sapiens
ggtgacccgatcggagccca

SEQ ID NO: 1784 - DNA, 20 bp, Homo sapiens
agctggagagagaagggaca

SEQ ID NO: 1785 - DNA, 20 bp, Homo sapiens
gggccatctagctggagaga

SEQ ID NO: 1786 - DNA, 20 bp, Homo sapiens
ccccactgcaagaagtcggc

SEQ ID NO: 1787 - DNA, 20 bp, Homo sapiens
ttgagcccttttaaggcagc

SEQ ID NO: 1788 - DNA, 20 bp, Homo sapiens
acatgggaaggtggatccgt

SEQ ID NO: 1789 - DNA, 20 bp, Homo sapiens
ggaagcacgacacctcgcct

SEQ ID NO: 1790 - DNA, 20 bp, Homo sapiens
ggccatatgggaaggtggat

SEQ ID NO: 1791 - DNA, 16 bp, Homo sapiens
gcttgcacgtgtggct

SEQ ID NO: 1792 - DNA, 14 bp, Homo sapiens
cttgcacgtgtggc

SEQ ID NO: 1793 - DNA, 16 bp, Homo sapiens
ggttgtgaactggcag

SEQ ID NO: 1794 - DNA, 16 bp, Homo sapiens
gagcggttgtgaactg

SEQ ID NO: 1795 - DNA, 14 bp, Homo sapiens
agcggttgtgaact

SEQ ID NO: 1796 - DNA, 16 bp, Homo sapiens
gctgccttcccaggcc

SEQ ID NO: 1797 - DNA, 16 bp, Homo sapiens
gcactttgcgaaccaa

SEQ ID NO: 1798 - DNA, 14 bp, Homo sapiens
cactttgcgaacca

SEQ ID NO: 1799 - DNA, 16 bp, Homo sapiens
gaaagctttgcacttt

SEQ ID NO: 1800 - DNA, 16 bp, Homo sapiens
cggaggacgaggtcaa

SEQ ID NO: 1801 - DNA, 16 bp, Homo sapiens
agcctgtcagcgagtc

SEQ ID NO: 1802 - DNA, 14 bp, Homo sapiens
gcctgtcagcgagt

SEQ ID NO: 1803 - DNA, 16 bp, Homo sapiens
tcctgtagcctgtcag

SEQ ID NO: 1804 - DNA, 16 bp, Homo sapiens
gaagcgaggcttcact

SEQ ID NO: 1805 - DNA, 16 bp, Homo sapiens
acctgcccgtctggca

SEQ ID NO: 1806 - DNA, 14 bp, Homo sapiens
cctgcccgtctggc

SEQ ID NO: 1807 - DNA, 16 bp, Homo sapiens
ggtcagcgatcccagg

SEQ ID NO: 1808 - DNA, 14 bp, Homo sapiens
gtcagcgatcccag

SEQ ID NO: 1809 - DNA, 16 bp, Homo sapiens
gaatgactttaatgct

SEQ ID NO: 1810 - DNA, 24 bp, Homo sapiens
tgaagggtctgtgctagatcaaaa

SEQ ID NO: 1811 - DNA, 20 bp, Homo sapiens
tgcctttaggattctagaca

SEQ ID NO: 1812 - DNA, 20 bp, Homo sapiens
taattgccaatatttgcccc

SEQ ID NO: 1813 - DNA, 20 bp, Homo sapiens
gggagttacttgccaacttg

SEQ ID NO: 1814 - DNA, 20 bp, Homo sapiens
ttgcagttaaacaatggaaa

SEQ ID NO: 1815 - DNA, 20 bp, Homo sapiens
ccaggctggttatgactcag

SEQ ID NO: 1816 - DNA, 20 bp, Homo sapiens
ttatcaattcaccaaggagc

SEQ ID NO: 1817 - DNA, 20 bp, Homo sapiens
atggaggtatgacatataat

SEQ ID NO: 1818 - DNA, 20 bp, Homo sapiens
ggcatatgcagataatgttc

SEQ ID NO: 1819 - DNA, 20 bp, Homo sapiens
acattggcacacagcacagc

SEQ ID NO: 1820 - DNA, 20 bp, Homo sapiens
aggcaaacgaaacattggca

SEQ ID NO: 1821 - DNA, 20 bp, Homo sapiens
ctaacatgcaatactgcaga

SEQ ID NO: 1822 - DNA, 20 bp, Homo sapiens
aagcccacaggaacaagtcc

SEQ ID NO: 1823 - DNA, 20 bp, Homo sapiens
ggtcaatagtgtaaaacatt

SEQ ID NO: 1824 - DNA, 20 bp, Homo sapiens
ttcatgaaggatgaaatgcc

SEQ ID NO: 1825 - DNA, 20 bp, Homo sapiens
caatgcattctaatagcagc

SEQ ID NO: 1826 - DNA, 20 bp, Homo sapiens
aacatttccacttgccagtt

SEQ ID NO: 1827 - DNA, 20 bp, Homo sapiens
ggttcccaatccccacattt

SEQ ID NO: 1828 - DNA, 20 bp, Homo sapiens
taataaaaatcaggtgaggc

SEQ ID NO: 1829 - DNA, 20 bp, Homo sapiens
tcccacccagcattacagtt

SEQ ID NO: 1830 - DNA, 25 bp, Homo sapiens
tcatcctaccactcccaattaatct

SEQ ID NO: 1831 - DNA, 29 bp, Homo sapiens
aaaggttaccataagtaagttccagaaaa

SEQ ID NO: 1832 - DNA, 20 bp, Homo sapiens
taagatgctagcttggccaa

SEQ ID NO: 1833 - DNA, 20 bp, Homo sapiens
agcgaggcttcacttggcgc

SEQ ID NO: 1834 - DNA, 20 bp, Homo sapiens
gggaagcgaggcttcacttg

SEQ ID NO: 1835 - DNA, 20 bp, Homo sapiens
gcggtcagcgatcccagggt

SEQ ID NO: 1836 - DNA, 20 bp, Homo sapiens
gggtgccagcgcggtgatct

SEQ ID NO: 1837 - DNA, 20 bp, Homo sapiens
tgttacaaagaaagtgactg

SEQ ID NO: 1838 - DNA, 20 bp, Homo sapiens
cgatggcagcaacggaagtt

SEQ ID NO: 1839 - DNA, 20 bp, Homo sapiens
gtcagtttacgatggcagca

SEQ ID NO: 1840 - DNA, 20 bp, Homo sapiens
cagggctttgtttcgaaaaa

SEQ ID NO: 1841 - DNA, 20 bp, Homo sapiens
ccattttcttccacagggct

SEQ ID NO: 1842 - DNA, 20 bp, Homo sapiens
atgcttcttcaagttttcca

SEQ ID NO: 1843 - DNA, 20 bp, Homo sapiens
cagaatgactttaatgcttc

SEQ ID NO: 1844 - DNA, 20 bp, Homo sapiens
cccccccattgagaagattc

SEQ ID NO: 1845 - DNA, 21 bp, Homo sapiens
gcgtagttgactggcgaagtt

SEQ ID NO: 1846 - DNA, 20 bp, Homo sapiens
ctttgcactttgcgaaccaa

SEQ ID NO: 1847 - DNA, 20 bp, Homo sapiens
ttgcactttgcgaaccaacg

SEQ ID NO: 1848 - DNA, 20 bp, Homo sapiens
aagaaagctttgcactttgc

SEQ ID NO: 1849 - DNA, 20 bp, Homo sapiens
gtcggaggacgaggtcaata

SEQ ID NO: 1850 - DNA, 20 bp, Homo sapiens
cggagcggttgtgaactggc

SEQ ID NO: 1851 - DNA, 16 bp, Homo sapiens
cctaagggcctcctgg

SEQ ID NO: 1852 - DNA, 20 bp, Homo sapiens
gccacacacggcagtaaatg

SEQ ID NO: 1853 - DNA, 16 bp, Homo sapiens
tggacaccggtcggcg

SEQ ID NO: 1854 - DNA, 16 bp, Homo sapiens
tcttaatttcatgtac

SEQ ID NO: 1855 - DNA, 16 bp, Homo sapiens
ggttgactacaaaggg

SEQ ID NO: 1856 - DNA, 20 bp, Homo sapiens
tgagccaccagtgtccaaaa

SEQ ID NO: 1857 - DNA, 16 bp, Homo sapiens
ttcatattgttctgcc

SEQ ID NO: 1858 - DNA, 16 bp, Homo sapiens
tgctttaaggctaaca

SEQ ID NO: 1859 - DNA, 16 bp, Homo sapiens
gtccaagggcagccgg

SEQ ID NO: 1860 - DNA, 12 bp, Homo sapiens
gttaatgacatt

SEQ ID NO: 1861 - DNA, 16 bp, Homo sapiens
attaggtattatggta

SEQ ID NO: 1862 - DNA, 18 bp, Homo sapiens
gtaggtgatgatggtccg

SEQ ID NO: 1863 - DNA, 20 bp, Homo sapiens
ccttatcaagatgcgaactc

SEQ ID NO: 1864 - DNA, 16 bp, Homo sapiens
gcaaaatgatctaggc

SEQ ID NO: 1865 - DNA, 16 bp, Homo sapiens
tgcctgggtatgtttg

SEQ ID NO: 1866 - DNA, 18 bp, Homo sapiens
agatgatgttctccaggt

SEQ ID NO: 1867 - DNA, 16 bp, Homo sapiens
ccctcaacgacctggc

SEQ ID NO: 1868 - DNA, 22 bp, Homo sapiens
tccggttctgaaggtgttcttg

SEQ ID NO: 1869 - DNA, 16 bp, Homo sapiens
tcagaaaaggagggta

SEQ ID NO: 1870 - DNA, 20 bp, Homo sapiens
gctgtattatctccaaactc

SEQ ID NO: 1871 - DNA, 18 bp, Homo sapiens
caggaatttgtgtctttc

SEQ ID NO: 1872 - DNA, 16 bp, Homo sapiens
tgcaagctgccacctt

SEQ ID NO: 1873 - DNA, 12 bp, Homo sapiens
tgaggcattatc

SEQ ID NO: 1874 - DNA, 16 bp, Homo sapiens
caacaatgcaacaacg

SEQ ID NO: 1875 - DNA, 14 bp, Homo sapiens
attagccatatctc

SEQ ID NO: 1876 - DNA, 16 bp, Homo sapiens
catcacactcctcgat

SEQ ID NO: 1877 - DNA, 16 bp, Homo sapiens
acccaaccttgggaca

SEQ ID NO: 1878 - DNA, 16 bp, Homo sapiens
gggcaatgaggacatc

SEQ ID NO: 1879 - DNA, 16 bp, Homo sapiens
tcaatacctgcacagg

SEQ ID NO: 1880 - DNA, 18 bp, Homo sapiens
aaatgacatgaggcagtc

SEQ ID NO: 1881 - DNA, 16 bp, Homo sapiens
gctctttcagcttgac

SEQ ID NO: 1882 - DNA, 16 bp, Homo sapiens
ccgtgagggaactttc

SEQ ID NO: 1883 - DNA, 16 bp, Homo sapiens
ggaagatggccgggtg

SEQ ID NO: 1884 - DNA, 16 bp, Homo sapiens
gccaacgcagatagac

SEQ ID NO: 1885 - DNA, 16 bp, Homo sapiens
ggataaccaggtcgac

SEQ ID NO: 1886 - DNA, 16 bp, Homo sapiens
ccccatagaagaacaa

SEQ ID NO: 1887 - DNA, 16 bp, Homo sapiens
aaggatggatgtgtca

SEQ ID NO: 1888 - DNA, 18 bp, Homo sapiens
ttctcaaagacagtaggg

SEQ ID NO: 1889 - DNA, 16 bp, Homo sapiens
ggctctttcagcttga

SEQ ID NO: 1890 - DNA, 20 bp, Homo sapiens
taactctttctggccttgaa

SEQ ID NO: 1891 - DNA, 12 bp, Homo sapiens
gccgatgttgct

SEQ ID NO: 1892 - DNA, 16 bp, Homo sapiens
cttaattacagcttgt

SEQ ID NO: 1893 - DNA, 16 bp, Homo sapiens
gatttatgcgattggc

SEQ ID NO: 1894 - DNA, 25 bp, Homo sapiens
aaactgttcagcttctgttagccac

SEQ ID NO: 1895 - DNA, 12 bp, Homo sapiens
caagtttcttca

SEQ ID NO: 1896 - DNA, 16 bp, Homo sapiens
ctcaagtagttcccct

SEQ ID NO: 1897 - DNA, 16 bp, Homo sapiens
aaattacggtttacat

SEQ ID NO: 1898 - DNA, 16 bp, Homo sapiens
tatgaccgtggccagc

SEQ ID NO: 1899 - DNA, 16 bp, Homo sapiens
atacaaaagtacaggg

SEQ ID NO: 1900 - DNA, 16 bp, Homo sapiens
ccgcacttatagaagg

SEQ ID NO: 1901 - DNA, 16 bp, Homo sapiens
tctcggcacacttttt

SEQ ID NO: 1902 - DNA, 16 bp, Homo sapiens
tctgtctcctctcgca

SEQ ID NO: 1903 - DNA, 19 bp, Homo sapiens
cgagaggcggacgggaccg

SEQ ID NO: 1904 - DNA, 16 bp, Homo sapiens
cactactagtttctgt

SEQ ID NO: 1905 - DNA, 16 bp, Homo sapiens
acttcaaactcggctc

SEQ ID NO: 1906 - DNA, 12 bp, Homo sapiens
gcaccaatatgc

SEQ ID NO: 1907 - DNA, 16 bp, Homo sapiens
tgccggtaggccgggt

SEQ ID NO: 1908 - DNA, 16 bp, Homo sapiens
gtataagaccctatct

SEQ ID NO: 1909 - DNA, 16 bp, Homo sapiens
ccagagtgaagatctc

SEQ ID NO: 1910 - DNA, 16 bp, Homo sapiens
atacccctgcacccca

SEQ ID NO: 1911 - DNA, 16 bp, Homo sapiens
tgtagccgttgctccc

SEQ ID NO: 1912 - DNA, 16 bp, Homo sapiens
ctagatacaaggctgc

SEQ ID NO: 1913 - DNA, 20 bp, Homo sapiens
acgctgcaggagactacgac

SEQ ID NO: 1914 - DNA, 16 bp, Homo sapiens
taccaggacagtgact

SEQ ID NO: 1915 - DNA, 20 bp, Homo sapiens
aatgccacataccttctaga

SEQ ID NO: 1916 - DNA, 16 bp, Homo sapiens
ggccggccaatgctca

SEQ ID NO: 1917 - DNA, 16 bp, Homo sapiens
atccgaactggccgag

SEQ ID NO: 1918 - DNA, 16 bp, Homo sapiens
attttaaagaagacgg

SEQ ID NO: 1919 - DNA, 16 bp, Homo sapiens
acatatcttgcatgac

SEQ ID NO: 1920 - DNA, 20 bp, Homo sapiens
tttgaggacttgcgctttca

SEQ ID NO: 1921 - DNA, 20 bp, Homo sapiens
aatcttccaagtgatcataa

SEQ ID NO: 1922 - DNA, 16 bp, Homo sapiens
tcagcttgacgacctg

SEQ ID NO: 1923 - DNA, 14 bp, Homo sapiens
ttaaatttggcggt

SEQ ID NO: 1924 - DNA, 16 bp, Homo sapiens
gccatatgtgtggctc

SEQ ID NO: 1925 - DNA, 16 bp, Homo sapiens
ttgtagtgtggaatat

SEQ ID NO: 1926 - DNA, 16 bp, Homo sapiens
gagctcctgctaatgg

SEQ ID NO: 1927 - DNA, 16 bp, Homo sapiens
gcacaccaagccttgg

SEQ ID NO: 1928 - DNA, 16 bp, Homo sapiens
cgcggagccaggccct

SEQ ID NO: 1929 - DNA, 15 bp, Homo sapiens
caattttgatggaat

SEQ ID NO: 1930 - DNA, 16 bp, Homo sapiens
gctatgaaggttttca

SEQ ID NO: 1931 - DNA, 12 bp, Homo sapiens
cggtttttgttc

SEQ ID NO: 1932 - DNA, 16 bp, Homo sapiens
tacaaagtagttcctc

SEQ ID NO: 1933 - DNA, 16 bp, Homo sapiens
ggcaagtgaccaggtg

SEQ ID NO: 1934 - DNA, 14 bp, Homo sapiens
atgtctgggagcct

SEQ ID NO: 1935 - DNA, 16 bp, Homo sapiens
aagaatcagactcttc

SEQ ID NO: 1936 - DNA, 16 bp, Homo sapiens
acaatgacgaggctgg

SEQ ID NO: 1937 - DNA, 16 bp, Homo sapiens
gaaaatgacctgtcct

SEQ ID NO: 1938 - DNA, 18 bp, Homo sapiens
ggtcaggtggtgtgatgg

SEQ ID NO: 1939 - DNA, 14 bp, Homo sapiens
tcagacttacagta

SEQ ID NO: 1940 - DNA, 12 bp, Homo sapiens
accctcattcag

SEQ ID NO: 1941 - DNA, 16 bp, Homo sapiens
cggcaaggcattttaa

SEQ ID NO: 1942 - DNA, 16 bp, Homo sapiens
agctacgcaggtaaaa

SEQ ID NO: 1943 - DNA, 16 bp, Homo sapiens
cccagggcttctccgg

SEQ ID NO: 1944 - DNA, 16 bp, Homo sapiens
gcccaagaagaccttg

SEQ ID NO: 1945 - DNA, 16 bp, Homo sapiens
atacagagtgcaggca

SEQ ID NO: 1946 - DNA, 16 bp, Homo sapiens
gatatattgctgggca

SEQ ID NO: 1947 - DNA, 20 bp, Homo sapiens
agtaatattcatacttgtct

SEQ ID NO: 1948 - DNA, 16 bp, Homo sapiens
ggcttaacaagtagta

SEQ ID NO: 1949 - DNA, 16 bp, Homo sapiens
attaatactcttaacg

SEQ ID NO: 1950 - DNA, 16 bp, Homo sapiens
tggaaccccggtgccc

SEQ ID NO: 1951 - DNA, 12 bp, Homo sapiens
gttgttgttccc

SEQ ID NO: 1952 - DNA, 16 bp, Homo sapiens
gggaatgatgccacct

SEQ ID NO: 1953 - DNA, 16 bp, Homo sapiens
tgagaggttgactaca

SEQ ID NO: 1954 - DNA, 16 bp, Homo sapiens
catcataacaggctgt

SEQ ID NO: 1955 - DNA, 18 bp, Homo sapiens
acttcagttggtgacaga

SEQ ID NO: 1956 - DNA, 16 bp, Homo sapiens
gttgacattcatatac

SEQ ID NO: 1957 - DNA, 16 bp, Homo sapiens
aaccagacctcatgca

SEQ ID NO: 1958 - DNA, 16 bp, Homo sapiens
aatcctgttatatctt

SEQ ID NO: 1959 - DNA, 16 bp, Homo sapiens
ttgaaagccaacctgg

SEQ ID NO: 1960 - DNA, 14 bp, Homo sapiens
cgcagaaatggata

SEQ ID NO: 1961 - DNA, 16 bp, Homo sapiens
gaggtaagggttactt

SEQ ID NO: 1962 - DNA, 14 bp, Homo sapiens
cggtgtcataatgt

SEQ ID NO: 1963 - DNA, 16 bp, Homo sapiens
ggtgacctgtggcaat

SEQ ID NO: 1964 - DNA, 16 bp, Homo sapiens
caggtccttgtagacg

SEQ ID NO: 1965 - DNA, 18 bp, Homo sapiens
tgttctccaggtcgaaag

SEQ ID NO: 1966 - DNA, 14 bp, Homo sapiens
aaagagtcccgcca

SEQ ID NO: 1967 - DNA, 16 bp, Homo sapiens
gtcagcatgataggga

SEQ ID NO: 1968 - DNA, 16 bp, Homo sapiens
tctgactgatcaggaa

SEQ ID NO: 1969 - DNA, 16 bp, Homo sapiens
agctcaaatgggaacc

SEQ ID NO: 1970 - DNA, 16 bp, Homo sapiens
acacatttagcatgac

SEQ ID NO: 1971 - DNA, 16 bp, Homo sapiens
ctagacatgtaactcc

SEQ ID NO: 1972 - DNA, 14 bp, Homo sapiens
cactgatcctgcac

SEQ ID NO: 1973 - DNA, 16 bp, Homo sapiens
cttccacagtatatct

SEQ ID NO: 1974 - DNA, 16 bp, Homo sapiens
gcggtatgggtggcag

SEQ ID NO: 1975 - DNA, 12 bp, Homo sapiens
tgctcacaggcg

SEQ ID NO: 1976 - DNA, 20 bp, Homo sapiens
gtagatgaccgtcccctggg

SEQ ID NO: 1977 - DNA, 18 bp, Homo sapiens
cccgccgcagctgcttct

SEQ ID NO: 1978 - DNA, 16 bp, Homo sapiens
gcaatgtccagtccta

SEQ ID NO: 1979 - DNA, 16 bp, Homo sapiens
atgaccgtggccagct

SEQ ID NO: 1980 - DNA, 16 bp, Homo sapiens
acggagacggcacgga

SEQ ID NO: 1981 - DNA, 16 bp, Homo sapiens
ccatatgctcagcaca

SEQ ID NO: 1982 - DNA, 16 bp, Homo sapiens
tttttgagaggttgac

SEQ ID NO: 1983 - DNA, 20 bp, Homo sapiens
tcttcaggtcgttatccaaa

SEQ ID NO: 1984 - DNA, 12 bp, Homo sapiens
caggccatgtgg

SEQ ID NO: 1985 - DNA, 16 bp, Homo sapiens
ggccttacctgggcac

SEQ ID NO: 1986 - DNA, 16 bp, Homo sapiens
ctctggccgatggagc

SEQ ID NO: 1987 - DNA, 16 bp, Homo sapiens
cattcatgtccatgac

SEQ ID NO: 1988 - DNA, 18 bp, Homo sapiens
cagggagtcagggagggc

SEQ ID NO: 1989 - DNA, 14 bp, Homo sapiens
gtgcacacagctga

SEQ ID NO: 1990 - DNA, 16 bp, Homo sapiens
cccaaagtgcaacacc

SEQ ID NO: 1991 - DNA, 16 bp, Homo sapiens
tacagagtgcaggcac

SEQ ID NO: 1992 - DNA, 18 bp, Homo sapiens
gagccgctcggcctctcc

SEQ ID NO: 1993 - DNA, 20 bp, Homo sapiens
catttccacctttgcccaag

SEQ ID NO: 1994 - DNA, 20 bp, Homo sapiens
gtttccctcgtgttgctcag

SEQ ID NO: 1995 - DNA, 16 bp, Homo sapiens
aacaaatatatgcacg

SEQ ID NO: 1996 - DNA, 16 bp, Homo sapiens
gcgcagtgcggtgtcc

SEQ ID NO: 1997 - DNA, 16 bp, Homo sapiens
aggtattatggtatgt

SEQ ID NO: 1998 - DNA, 16 bp, Homo sapiens
cagctgggcactaccg

SEQ ID NO: 1999 - DNA, 16 bp, Homo sapiens
ctacaagtgagctgag

SEQ ID NO: 2000 - DNA, 16 bp, Homo sapiens
ggttatggtcttaggt

SEQ ID NO: 2001 - DNA, 12 bp, Homo sapiens
atcttgtgaaac

SEQ ID NO: 2002 - DNA, 16 bp, Homo sapiens
gcttactggtacactg

SEQ ID NO: 2003 - DNA, 16 bp, Homo sapiens
tggaactgtttacagt

SEQ ID NO: 2004 - DNA, 16 bp, Homo sapiens
aaagaactcgggaggt

SEQ ID NO: 2005 - DNA, 16 bp, Homo sapiens
gcagatctggctgcct

SEQ ID NO: 2006 - DNA, 16 bp, Homo sapiens
taccagggactcaact

SEQ ID NO: 2007 - DNA, 16 bp, Homo sapiens
aggtagtgacctccag

SEQ ID NO: 2008 - DNA, 16 bp, Homo sapiens
gtacatggtggagtcc

SEQ ID NO: 2009 - DNA, 14 bp, Homo sapiens
ctttgtggtgccaa

SEQ ID NO: 2010 - DNA, 16 bp, Homo sapiens
ggcggagggccccaga

SEQ ID NO: 2011 - DNA, 16 bp, Homo sapiens
caaaaactcggcatgt

SEQ ID NO: 2012 - DNA, 16 bp, Homo sapiens
tacatctggactatgg

SEQ ID NO: 2013 - DNA, 16 bp, Homo sapiens
tctaatatagagagct

SEQ ID NO: 2014 - DNA, 14 bp, Homo sapiens
ccgccactgaacat

SEQ ID NO: 2015 - DNA, 16 bp, Homo sapiens
gtggttaatatggccg

SEQ ID NO: 2016 - DNA, 16 bp, Homo sapiens
cgtcttctgcagatgt

SEQ ID NO: 2017 - DNA, 16 bp, Homo sapiens
gtgcaaggtacatggt

SEQ ID NO: 2018 - DNA, 12 bp, Homo sapiens
gatgttgctggc

SEQ ID NO: 2019 - DNA, 18 bp, Homo sapiens
aactcaaagtcagtggct

SEQ ID NO: 2020 - DNA, 19 bp, Homo sapiens
agagagaacaagaaggctc

SEQ ID NO: 2021 - DNA, 16 bp, Homo sapiens
gttttattggccgggt

SEQ ID NO: 2022 - DNA, 16 bp, Homo sapiens
aataacacagccatgc

SEQ ID NO: 2023 - DNA, 16 bp, Homo sapiens
accaagggtccctgcc

SEQ ID NO: 2024 - DNA, 16 bp, Homo sapiens
ccggagctgagggaca

SEQ ID NO: 2025 - DNA, 16 bp, Homo sapiens
ctggaaacagtctcgc

SEQ ID NO: 2026 - DNA, 16 bp, Homo sapiens
ccgcatacagcctttt

SEQ ID NO: 2027 - DNA, 16 bp, Homo sapiens
tgttatgaacctatca

SEQ ID NO: 2028 - DNA, 16 bp, Homo sapiens
actgagcttactggta

SEQ ID NO: 2029 - DNA, 16 bp, Homo sapiens
acactattggcacacc

SEQ ID NO: 2030 - DNA, 16 bp, Homo sapiens
gaccacgagatcaaca

SEQ ID NO: 2031 - DNA, 16 bp, Homo sapiens
ctccactttgtgtctg

SEQ ID NO: 2032 - DNA, 16 bp, Homo sapiens
tgccactccctatccc

SEQ ID NO: 2033 - DNA, 16 bp, Homo sapiens
atgaattctggtctgg

SEQ ID NO: 2034 - DNA, 16 bp, Homo sapiens
gtaaagggtgtgcaca

SEQ ID NO: 2035 - DNA, 12 bp, Homo sapiens
ggtacaggtcga

SEQ ID NO: 2036 - DNA, 16 bp, Homo sapiens
ggaaatctaacactgg

SEQ ID NO: 2037 - DNA, 16 bp, Homo sapiens
gagatcaacacatttc

SEQ ID NO: 2038 - DNA, 18 bp, Homo sapiens
agtttggagatggcagtt

SEQ ID NO: 2039 - DNA, 18 bp, Homo sapiens
ttcttgtacttcatccca

SEQ ID NO: 2040 - DNA, 16 bp, Homo sapiens
attgatacagccgttc

SEQ ID NO: 2041 - DNA, 16 bp, Homo sapiens
tgcatttggtcttgct

SEQ ID NO: 2042 - DNA, 20 bp, Homo sapiens
tatgacagttgcttgagttt

SEQ ID NO: 2043 - DNA, 18 bp, Homo sapiens
tactcccctcgtttgtgc

SEQ ID NO: 2044 - DNA, 20 bp, Homo sapiens
catcatgttccatttttcgc

SEQ ID NO: 2045 - DNA, 16 bp, Homo sapiens
tggaagtacacaggct

SEQ ID NO: 2046 - DNA, 16 bp, Homo sapiens
atgacaagggtcttgg

SEQ ID NO: 2047 - DNA, 16 bp, Homo sapiens
gaatttgggattgtgg

SEQ ID NO: 2048 - DNA, 16 bp, Homo sapiens
cccaatagaggtttaa

SEQ ID NO: 2049 - DNA, 12 bp, Homo sapiens
agattggtcagg

SEQ ID NO: 2050 - DNA, 16 bp, Homo sapiens
aatatgattcatctcg

SEQ ID NO: 2051 - DNA, 16 bp, Homo sapiens
ctccaagttcaggagc

SEQ ID NO: 2052 - DNA, 16 bp, Homo sapiens
gagtgcaggcacttac

SEQ ID NO: 2053 - DNA, 16 bp, Homo sapiens
gtttaataatgtgcag

SEQ ID NO: 2054 - DNA, 25 bp, Homo sapiens
ccaatgccatcctggagttcctgta

SEQ ID NO: 2055 - DNA, 25 bp, Homo sapiens
ctgttgcctccggttctgaaggtgt

SEQ ID NO: 2056 - DNA, 20 bp, Homo sapiens
acgttcagaacttatctttt

SEQ ID NO: 2057 - DNA, 14 bp, Homo sapiens
atgaacaccgcggc

SEQ ID NO: 2058 - DNA, 18 bp, Homo sapiens
atccggaagatgatgttc

SEQ ID NO: 2059 - DNA, 16 bp, Homo sapiens
aagattatggtttcct

SEQ ID NO: 2060 - DNA, 16 bp, Homo sapiens
tcatagccaatataac

SEQ ID NO: 2061 - DNA, 16 bp, Homo sapiens
atcaattttaaacacg

SEQ ID NO: 2062 - DNA, 20 bp, Homo sapiens
ttaatgcaacttcttgattg

SEQ ID NO: 2063 - DNA, 16 bp, Homo sapiens
gcagaccacgcctggc

SEQ ID NO: 2064 - DNA, 16 bp, Homo sapiens
gatgatcctttcaccc

SEQ ID NO: 2065 - DNA, 20 bp, Homo sapiens
ccaacatgcctctcttcatc

SEQ ID NO: 2066 - DNA, 16 bp, Homo sapiens
gggcaaggcactcgga

SEQ ID NO: 2067 - DNA, 16 bp, Homo sapiens
gtgttaattgtgcact

SEQ ID NO: 2068 - DNA, 16 bp, Homo sapiens
gcacaaacaggatacg

SEQ ID NO: 2069 - DNA, 18 bp, Homo sapiens
cttgttcttgcggacctg

SEQ ID NO: 2070 - DNA, 16 bp, Homo sapiens
caagtaactgagtcac

SEQ ID NO: 2071 - DNA, 16 bp, Homo sapiens
cgatgagggtcaagtt

SEQ ID NO: 2072 - DNA, 16 bp, Homo sapiens
catgaggtaggacagc

SEQ ID NO: 2073 - DNA, 15 bp, Homo sapiens
aacttaccaccagtg

SEQ ID NO: 2074 - DNA, 16 bp, Homo sapiens
aaagtttaggcatggt

SEQ ID NO: 2075 - DNA, 17 bp, Homo sapiens
ttcctcactgaggatga

SEQ ID NO: 2076 - DNA, 16 bp, Homo sapiens
tgtatggtggctcagc

SEQ ID NO: 2077 - DNA, 16 bp, Homo sapiens
acacgaagggcccctc

SEQ ID NO: 2078 - DNA, 18 bp, Homo sapiens
ttgtttaaatttctgaat

SEQ ID NO: 2079 - DNA, 16 bp, Homo sapiens
gctaaactggcctccg

SEQ ID NO: 2080 - DNA, 16 bp, Homo sapiens
tagaaaatgcggaggg

SEQ ID NO: 2081 - DNA, 16 bp, Homo sapiens
tactatattcaacagg

SEQ ID NO: 2082 - DNA, 30 bp, Homo sapiens
ctccaacatcaaggaagatggcatttctag

SEQ ID NO: 2083 - DNA, 16 bp, Homo sapiens
acctacttggcaaacc

SEQ ID NO: 2084 - DNA, 12 bp, Homo sapiens
ccaagccacttg

SEQ ID NO: 2085 - DNA, 16 bp, Homo sapiens
gaaagaagtgctatta

SEQ ID NO: 2086 - DNA, 20 bp, Homo sapiens
aggtcccctccttgcaggag

SEQ ID NO: 2087 - DNA, 16 bp, Homo sapiens
ccctgcgctcctcgcc

SEQ ID NO: 2088 - DNA, 16 bp, Homo sapiens
gctgacggcacgcaca

SEQ ID NO: 2089 - DNA, 18 bp, Homo sapiens
tcccacaggcaccatccc

SEQ ID NO: 2090 - DNA, 16 bp, Homo sapiens
gactatcagtatgcac

SEQ ID NO: 2091 - DNA, 20 bp, Homo sapiens
gctgattagagagaggtccc

SEQ ID NO: 2092 - DNA, 16 bp, Homo sapiens
tacaaaaatatacggg

SEQ ID NO: 2093 - DNA, 16 bp, Homo sapiens
tagagacacctccagc

SEQ ID NO: 2094 - DNA, 14 bp, Homo sapiens
tggtcttgtgattg

SEQ ID NO: 2095 - DNA, 16 bp, Homo sapiens
ggccaggtccatgttg

SEQ ID NO: 2096 - DNA, 25 bp, Homo sapiens
ctccggttctgaaggtgttcttgta

SEQ ID NO: 2097 - DNA, 16 bp, Homo sapiens
gtacacctcaggcctg

SEQ ID NO: 2098 - DNA, 20 bp, Homo sapiens
ctcctgagagtgagatcaca

SEQ ID NO: 2099 - DNA, 16 bp, Homo sapiens
tatgtacacctcaggc

SEQ ID NO: 2100 - DNA, 16 bp, Homo sapiens
ccaaatggtggtggca

SEQ ID NO: 2101 - DNA, 16 bp, Homo sapiens
tgatttacaggatgct

SEQ ID NO: 2102 - DNA, 25 bp, Homo sapiens
gcctccggttctgaaggtgttcttg

SEQ ID NO: 2103 - DNA, 16 bp, Homo sapiens
tgtaaattactattcg

SEQ ID NO: 2104 - DNA, 20 bp, Homo sapiens
tctaatggtgacaactgatc

SEQ ID NO: 2105 - DNA, 16 bp, Homo sapiens
tggacccctcattcag

SEQ ID NO: 2106 - DNA, 16 bp, Homo sapiens
acctaaggaagctgac

SEQ ID NO: 2107 - DNA, 16 bp, Homo sapiens
gcagaataatcctgtt

SEQ ID NO: 2108 - DNA, 16 bp, Homo sapiens
gttattaaggacaacc

SEQ ID NO: 2109 - DNA, 16 bp, Homo sapiens
tccaagagccctctta

SEQ ID NO: 2110 - DNA, 16 bp, Homo sapiens
agtaatgacccaggct

SEQ ID NO: 2111 - DNA, 16 bp, Homo sapiens
ccgcaggtccttgtag

SEQ ID NO: 2112 - DNA, 16 bp, Homo sapiens
ttactggtacactgcc

SEQ ID NO: 2113 - DNA, 16 bp, Homo sapiens
ccgttgctccccgccc

SEQ ID NO: 2114 - DNA, 16 bp, Homo sapiens
gggaaggaagtcccgg

SEQ ID NO: 2115 - DNA, 14 bp, Homo sapiens
cactgatccttaga

SEQ ID NO: 2116 - DNA, 16 bp, Homo sapiens
agatagaaatcagggc

SEQ ID NO: 2117 - DNA, 12 bp, Homo sapiens
tgagccaggtga

SEQ ID NO: 2118 - DNA, 16 bp, Homo sapiens
accacccacatagccc

SEQ ID NO: 2119 - DNA, 16 bp, Homo sapiens
caacacacttcaaact

SEQ ID NO: 2120 - DNA, 12 bp, Homo sapiens
tcctgcactgac

SEQ ID NO: 2121 - DNA, 16 bp, Homo sapiens
catgagaaaagggatc

SEQ ID NO: 2122 - DNA, 16 bp, Homo sapiens
tgctatgaccctcact

SEQ ID NO: 2123 - DNA, 12 bp, Homo sapiens
cgactgtggtca

SEQ ID NO: 2124 - DNA, 21 bp, Homo sapiens
cagttgcgtgtccattgccca

SEQ ID NO: 2125 - DNA, 16 bp, Homo sapiens
ttttgagaggttgact

SEQ ID NO: 2126 - DNA, 20 bp, Homo sapiens
attggccctaacagaaaatc

SEQ ID NO: 2127 - DNA, 16 bp, Homo sapiens
ttgaaatgcccaggtc

SEQ ID NO: 2128 - DNA, 16 bp, Homo sapiens
tgtatgaggactcaga

SEQ ID NO: 2129 - DNA, 14 bp, Homo sapiens
tttggtgcaggtcc

SEQ ID NO: 2130 - DNA, 16 bp, Homo sapiens
ttccagataagcccta

SEQ ID NO: 2131 - DNA, 16 bp, Homo sapiens
cagtatagtaacagct

SEQ ID NO: 2132 - DNA, 16 bp, Homo sapiens
tgcaaggcaactggtt

SEQ ID NO: 2133 - DNA, 14 bp, Homo sapiens
acttacagtaattg

SEQ ID NO: 2134 - DNA, 16 bp, Homo sapiens
gtttggcaaggacagc

SEQ ID NO: 2135 - DNA, 16 bp, Homo sapiens
gcggagatgagaacaa

SEQ ID NO: 2136 - DNA, 25 bp, Homo sapiens
gataggtggtatcaacatctgtaag

SEQ ID NO: 2137 - DNA, 14 bp, Homo sapiens
ttgccctcagggtt

SEQ ID NO: 2138 - DNA, 16 bp, Homo sapiens
cgtcgggccgaaagtt

SEQ ID NO: 2139 - DNA, 16 bp, Homo sapiens
cataaagcatggtgga

SEQ ID NO: 2140 - DNA, 16 bp, Homo sapiens
tccaaaactacaccga

SEQ ID NO: 2141 - DNA, 20 bp, Homo sapiens
tctcacgaatctcctcatgg

SEQ ID NO: 2142 - DNA, 18 bp, Homo sapiens
tgttctggtagacgagct

SEQ ID NO: 2143 - DNA, 16 bp, Homo sapiens
gcagaaattttgcgaa

SEQ ID NO: 2144 - DNA, 16 bp, Homo sapiens
gattaagtcatccggt

SEQ ID NO: 2145 - DNA, 16 bp, Homo sapiens
ctggtctgccgaggag

SEQ ID NO: 2146 - DNA, 16 bp, Homo sapiens
agctgccagtgctgca

SEQ ID NO: 2147 - DNA, 16 bp, Homo sapiens
tacaatcacaattgct

SEQ ID NO: 2148 - DNA, 18 bp, Homo sapiens
cagggtcttgatggcact

SEQ ID NO: 2149 - DNA, 12 bp, Homo sapiens
gaatccatcctc

SEQ ID NO: 2150 - DNA, 20 bp, Homo sapiens
tactgcattggtccttggcc

SEQ ID NO: 2151 - DNA, 16 bp, Homo sapiens
tgcgcaagggaaacgg

SEQ ID NO: 2152 - DNA, 19 bp, Homo sapiens
aatcttcaatagacacatc

SEQ ID NO: 2153 - DNA, 25 bp, Homo sapiens
tatgtgttacctacccttgtcggtc

SEQ ID NO: 2154 - DNA, 15 bp, Homo sapiens
actgctagcctctgg

SEQ ID NO: 2155 - DNA, 16 bp, Homo sapiens
ggcctgggatgctacc

SEQ ID NO: 2156 - DNA, 16 bp, Homo sapiens
acatattatgaatccc

SEQ ID NO: 2157 - DNA, 16 bp, Homo sapiens
tatctataacacatga

SEQ ID NO: 2158 - DNA, 16 bp, Homo sapiens
aaagagtttaagggcg

SEQ ID NO: 2159 - DNA, 16 bp, Homo sapiens
gaactggccgagatgg

SEQ ID NO: 2160 - DNA, 14 bp, Homo sapiens
tgcagccatgtact

SEQ ID NO: 2161 - DNA, 14 bp, Homo sapiens
catagcgcctctga

SEQ ID NO: 2162 - DNA, 12 bp, Homo sapiens
ctggtggtcagc

SEQ ID NO: 2163 - DNA, 18 bp, Homo sapiens
gcaggtagcccaaggtgg

SEQ ID NO: 2164 - DNA, 18 bp, Homo sapiens
tgtctctggtccttactt

SEQ ID NO: 2165 - DNA, 16 bp, Homo sapiens
cactacaccttaacgc

SEQ ID NO: 2166 - DNA, 16 bp, Homo sapiens
aatgagaggccgccgg

SEQ ID NO: 2167 - DNA, 26 bp, Homo sapiens
ccaatgccatcctggagttcctgtaa

SEQ ID NO: 2168 - DNA, 16 bp, Homo sapiens
tactactctgggtttc

SEQ ID NO: 2169 - DNA, 20 bp, Homo sapiens
cctcatggtcacatggatga

SEQ ID NO: 2170 - DNA, 16 bp, Homo sapiens
ggataatggtgggccg

SEQ ID NO: 2171 - DNA, 16 bp, Homo sapiens
ggttatctataacaca

SEQ ID NO: 2172 - DNA, 16 bp, Homo sapiens
gcgcatggactgcggg

SEQ ID NO: 2173 - DNA, 16 bp, Homo sapiens
cgccaggcttgggccc

SEQ ID NO: 2174 - DNA, 16 bp, Homo sapiens
tcaacgggagcaactt

SEQ ID NO: 2175 - DNA, 16 bp, Homo sapiens
ggaaggactatgtaca

SEQ ID NO: 2176 - DNA, 16 bp, Homo sapiens
gcgcccccggagagct

SEQ ID NO: 2177 - DNA, 16 bp, Homo sapiens
caaagagccttggcac

SEQ ID NO: 2178 - DNA, 16 bp, Homo sapiens
tcaatgtcgatcagca

SEQ ID NO: 2179 - DNA, 16 bp, Homo sapiens
ctgaagggcctcgcca

SEQ ID NO: 2180 - DNA, 16 bp, Homo sapiens
aattttctagacttta

SEQ ID NO: 2181 - DNA, 16 bp, Homo sapiens
atagatatctagatgg

SEQ ID NO: 2182 - DNA, 20 bp, Homo sapiens
ctcaagatctgtcccctaat

SEQ ID NO: 2183 - DNA, 16 bp, Homo sapiens
ctccacatcacggatc

SEQ ID NO: 2184 - DNA, 18 bp, Homo sapiens
gtgtcaaaaccctgtgga

SEQ ID NO: 2185 - DNA, 16 bp, Homo sapiens
taggtattatggtatg

SEQ ID NO: 2186 - DNA, 20 bp, Homo sapiens
acttacttacctcacaacgt

SEQ ID NO: 2187 - DNA, 20 bp, Homo sapiens
ttgtccacgcctgaagaagg

SEQ ID NO: 2188 - DNA, 16 bp, Homo sapiens
agacatggtggaacca

SEQ ID NO: 2189 - DNA, 16 bp, Homo sapiens
gactatgtacacctca

SEQ ID NO: 2190 - DNA, 20 bp, Homo sapiens
gcagctcctcagggtggtaa

SEQ ID NO: 2191 - DNA, 25 bp, Homo sapiens
tttgccgctgcccaatgccatcctg

SEQ ID NO: 2192 - DNA, 15 bp, Homo sapiens
agccccacgcactgg

SEQ ID NO: 2193 - DNA, 16 bp, Homo sapiens
caaaagagaacattcg

SEQ ID NO: 2194 - DNA, 12 bp, Homo sapiens
actttcataatg

SEQ ID NO: 2195 - DNA, 16 bp, Homo sapiens
ccgcaagccaccaggg

SEQ ID NO: 2196 - DNA, 16 bp, Homo sapiens
acgattcctgaaccgc

SEQ ID NO: 2197 - DNA, 16 bp, Homo sapiens
taaatctaacctaggc

SEQ ID NO: 2198 - DNA, 16 bp, Homo sapiens
ggaactgagcttactg

SEQ ID NO: 2199 - DNA, 16 bp, Homo sapiens
tttgccatatgcagct

SEQ ID NO: 2200 - DNA, 16 bp, Homo sapiens
cttatctgggctattt

SEQ ID NO: 2201 - DNA, 16 bp, Homo sapiens
gctcagctatctgagc

SEQ ID NO: 2202 - DNA, 16 bp, Homo sapiens
ggctagttcatgccgg

SEQ ID NO: 2203 - DNA, 15 bp, Homo sapiens
aaacttcaaaggtca

SEQ ID NO: 2204 - DNA, 16 bp, Homo sapiens
aaacataccaggacac

SEQ ID NO: 2205 - DNA, 16 bp, Homo sapiens
agtcattagtacgcca

SEQ ID NO: 2206 - DNA, 16 bp, Homo sapiens
accgctctgtatcttg

SEQ ID NO: 2207 - DNA, 16 bp, Homo sapiens
ggttacggttgttttt

SEQ ID NO: 2208 - DNA, 16 bp, Homo sapiens
ctggataaccaggtcg

SEQ ID NO: 2209 - DNA, 16 bp, Homo sapiens
gtcaaccaagacttag

SEQ ID NO: 2210 - DNA, 16 bp, Homo sapiens
gcaatggtggccgggc

SEQ ID NO: 2211 - DNA, 16 bp, Homo sapiens
ctatgtacacctcagg

SEQ ID NO: 2212 - DNA, 16 bp, Homo sapiens
caacaattgtctggtg

SEQ ID NO: 2213 - DNA, 16 bp, Homo sapiens
atacagatgatgtgtt

SEQ ID NO: 2214 - DNA, 16 bp, Homo sapiens
cgcgaaagtgtgtcac

SEQ ID NO: 2215 - DNA, 16 bp, Homo sapiens
ctgcccccacgggaac

SEQ ID NO: 2216 - DNA, 12 bp, Homo sapiens
catgagcttcac

SEQ ID NO: 2217 - DNA, 15 bp, Homo sapiens
aaaacgagggcccag

SEQ ID NO: 2218 - DNA, 16 bp, Homo sapiens
gcctacctggccatgg

SEQ ID NO: 2219 - DNA, 16 bp, Homo sapiens
tcgggattcactatgt

SEQ ID NO: 2220 - DNA, 16 bp, Homo sapiens
cacattggtggtcaag

SEQ ID NO: 2221 - DNA, 16 bp, Homo sapiens
tgccagaacctgaggt

SEQ ID NO: 2222 - DNA, 18 bp, Homo sapiens
cctgtgagccagaagtgt

SEQ ID NO: 2223 - DNA, 16 bp, Homo sapiens
ttctacataggaccat

SEQ ID NO: 2224 - DNA, 16 bp, Homo sapiens
agctatgaaggttttc

SEQ ID NO: 2225 - DNA, 16 bp, Homo sapiens
ttatatgtggacacct

SEQ ID NO: 2226 - DNA, 16 bp, Homo sapiens
aatatggccgggaagg

SEQ ID NO: 2227 - DNA, 20 bp, Homo sapiens
tgatgagcaagctcataaaa

SEQ ID NO: 2228 - DNA, 16 bp, Homo sapiens
tagcctcttctcaacg

SEQ ID NO: 2229 - DNA, 16 bp, Homo sapiens
cccgacccgagcgacc

SEQ ID NO: 2230 - DNA, 16 bp, Homo sapiens
cataacatgttactca

SEQ ID NO: 2231 - DNA, 16 bp, Homo sapiens
agtcagccgtcctcgc

SEQ ID NO: 2232 - DNA, 16 bp, Homo sapiens
tctagaaggaccctgt

SEQ ID NO: 2233 - DNA, 16 bp, Homo sapiens
caacatggcactccct

SEQ ID NO: 2234 - DNA, 16 bp, Homo sapiens
gtgccggtaggccggg

SEQ ID NO: 2235 - DNA, 18 bp, Homo sapiens
gaaaacgccgccatttct

SEQ ID NO: 2236 - DNA, 23 bp, Homo sapiens
cgttgcactttgcaatgctgctg

SEQ ID NO: 2237 - DNA, 16 bp, Homo sapiens
tctaaaggaggctgtt

SEQ ID NO: 2238 - DNA, 16 bp, Homo sapiens
gtaaaacggttgtggt

SEQ ID NO: 2239 - DNA, 16 bp, Homo sapiens
tggataattatgtccc

SEQ ID NO: 2240 - DNA, 14 bp, Homo sapiens
cccagtgggtttga

SEQ ID NO: 2241 - DNA, 18 bp, Homo sapiens
catttcattcaactgttg

SEQ ID NO: 2242 - DNA, 16 bp, Homo sapiens
gtcgacacatttcaga

SEQ ID NO: 2243 - DNA, 16 bp, Homo sapiens
accgcatacagccttt

SEQ ID NO: 2244 - DNA, 16 bp, Homo sapiens
tgtcaagggttctggt

SEQ ID NO: 2245 - DNA, 16 bp, Homo sapiens
aagtgagcagccacag

SEQ ID NO: 2246 - DNA, 12 bp, Homo sapiens
tgcttggaagga

SEQ ID NO: 2247 - DNA, 16 bp, Homo sapiens
tcggaatgtactctta

SEQ ID NO: 2248 - DNA, 14 bp, Homo sapiens
tgtttctgctaacg

SEQ ID NO: 2249 - DNA, 16 bp, Homo sapiens
catatgcagctgtcag

SEQ ID NO: 2250 - DNA, 16 bp, Homo sapiens
cataaaagcactctgg

SEQ ID NO: 2251 - DNA, 16 bp, Homo sapiens
ggtttaaaagcttcca

SEQ ID NO: 2252 - DNA, 14 bp, Homo sapiens
attcttaacacaga

SEQ ID NO: 2253 - DNA, 16 bp, Homo sapiens
catagtaccccacaca

SEQ ID NO: 2254 - DNA, 16 bp, Homo sapiens
gctgtcagcatgatag

SEQ ID NO: 2255 - DNA, 16 bp, Homo sapiens
acccatctaggcccca

SEQ ID NO: 2256 - DNA, 19 bp, Homo sapiens
ctctgaaaaagtcacacaa

SEQ ID NO: 2257 - DNA, 16 bp, Homo sapiens
tcctctcgcaaccggg

SEQ ID NO: 2258 - DNA, 20 bp, Homo sapiens
agtaaccacaggttgtgtca

SEQ ID NO: 2259 - DNA, 20 bp, Homo sapiens
tgagcagaagttggcatagt

SEQ ID NO: 2260 - DNA, 12 bp, Homo sapiens
ccactgatcctg

SEQ ID NO: 2261 - DNA, 16 bp, Homo sapiens
actggccgagatggga

SEQ ID NO: 2262 - DNA, 16 bp, Homo sapiens
tgacaagcagtgtggg

SEQ ID NO: 2263 - DNA, 16 bp, Homo sapiens
cgccgcctcatccggt

SEQ ID NO: 2264 - DNA, 16 bp, Homo sapiens
gtattaacctcatgaa

SEQ ID NO: 2265 - DNA, 15 bp, Homo sapiens
ctggatttgatggct

SEQ ID NO: 2266 - DNA, 16 bp, Homo sapiens
gatcagggccatagaa

SEQ ID NO: 2267 - DNA, 12 bp, Homo sapiens
gttcctataact

SEQ ID NO: 2268 - DNA, 16 bp, Homo sapiens
gctagcctctggattt

SEQ ID NO: 2269 - DNA, 16 bp, Homo sapiens
tcctatccatgggccc

SEQ ID NO: 2270 - DNA, 16 bp, Homo sapiens
tgattaaggtgatgct

SEQ ID NO: 2271 - DNA, 16 bp, Homo sapiens
aactttttggacttgc

SEQ ID NO: 2272 - DNA, 20 bp, Homo sapiens
tggcttccaccctcttcttc

SEQ ID NO: 2273 - DNA, 16 bp, Homo sapiens
tgcataggagatagaa

SEQ ID NO: 2274 - DNA, 16 bp, Homo sapiens
gcccacccgctcttcc

SEQ ID NO: 2275 - DNA, 15 bp, Homo sapiens
aacatgcctctcttc

SEQ ID NO: 2276 - DNA, 16 bp, Homo sapiens
gacctggccccgcggc

SEQ ID NO: 2277 - DNA, 16 bp, Homo sapiens
taagggttactttgcc

SEQ ID NO: 2278 - DNA, 16 bp, Homo sapiens
ccattaaaatttgccc

SEQ ID NO: 2279 - DNA, 19 bp, Homo sapiens
tgtttaatgtttatcagga

SEQ ID NO: 2280 - DNA, 16 bp, Homo sapiens
agacgcagggccacat

SEQ ID NO: 2281 - DNA, 16 bp, Homo sapiens
ccccaagtcctggcgg

SEQ ID NO: 2282 - DNA, 20 bp, Homo sapiens
acagacattttaactgagtt

SEQ ID NO: 2283 - DNA, 16 bp, Homo sapiens
aagaggtcactgttgg

SEQ ID NO: 2284 - DNA, 16 bp, Homo sapiens
gcaataagagattgga

SEQ ID NO: 2285 - DNA, 16 bp, Homo sapiens
aacctaatccccaaac

SEQ ID NO: 2286 - DNA, 16 bp, Homo sapiens
aatactcttaacgagg

SEQ ID NO: 2287 - DNA, 12 bp, Homo sapiens
actgaacattgg

SEQ ID NO: 2288 - DNA, 16 bp, Homo sapiens
ggaagatgcgattgat

SEQ ID NO: 2289 - DNA, 16 bp, Homo sapiens
gcggataatggtgggc

SEQ ID NO: 2290 - DNA, 16 bp, Homo sapiens
ggaggtgacggaaccg

SEQ ID NO: 2291 - DNA, 14 bp, Homo sapiens
tataggtcaagtct

SEQ ID NO: 2292 - DNA, 14 bp, Homo sapiens
tgcccatatttgtc

SEQ ID NO: 2293 - DNA, 16 bp, Homo sapiens
ggtccgtaggccttgg

SEQ ID NO: 2294 - DNA, 16 bp, Homo sapiens
ccctacatgggctttc

SEQ ID NO: 2295 - DNA, 16 bp, Homo sapiens
ctgccagtgctgcacg

SEQ ID NO: 2296 - DNA, 16 bp, Homo sapiens
tccaaaaatgggctgc

SEQ ID NO: 2297 - DNA, 16 bp, Homo sapiens
tgaaccaccgcataca

SEQ ID NO: 2298 - DNA, 16 bp, Homo sapiens
caaagtgcaacacccc

SEQ ID NO: 2299 - DNA, 16 bp, Homo sapiens
gtgatacccgggaggt

SEQ ID NO: 2300 - DNA, 16 bp, Homo sapiens
tcatttggcagccaca

SEQ ID NO: 2301 - DNA, 16 bp, Homo sapiens
tgccggcacgcacgcg

SEQ ID NO: 2302 - DNA, 16 bp, Homo sapiens
ccctaagggttttctg

SEQ ID NO: 2303 - DNA, 16 bp, Homo sapiens
ctcattattggcttgg

SEQ ID NO: 2304 - DNA, 16 bp, Homo sapiens
gctgagattacgcacc

SEQ ID NO: 2305 - DNA, 16 bp, Homo sapiens
aggtcgatgagggtca

SEQ ID NO: 2306 - DNA, 16 bp, Homo sapiens
cagcagggccaagtaa

SEQ ID NO: 2307 - DNA, 18 bp, Homo sapiens
ctggatgcccgggtcctc

SEQ ID NO: 2308 - DNA, 16 bp, Homo sapiens
atacttatcgcctttt

SEQ ID NO: 2309 - DNA, 16 bp, Homo sapiens
tgttatgtgggaatga

SEQ ID NO: 2310 - DNA, 16 bp, Homo sapiens
ctgtattgattagctc

SEQ ID NO: 2311 - DNA, 20 bp, Homo sapiens
ggtgctggcctggccacagc

SEQ ID NO: 2312 - DNA, 16 bp, Homo sapiens
ttattaaggacaacct

SEQ ID NO: 2313 - DNA, 18 bp, Homo sapiens
ctttgacttctttgaccc

SEQ ID NO: 2314 - DNA, 16 bp, Homo sapiens
atggattaatatcggc

SEQ ID NO: 2315 - DNA, 16 bp, Homo sapiens
ttcaaagataggtgag

SEQ ID NO: 2316 - DNA, 16 bp, Homo sapiens
gaagttcccgttctga

SEQ ID NO: 2317 - DNA, 23 bp, Homo sapiens
cctctgtgattttataacttgat

SEQ ID NO: 2318 - DNA, 20 bp, Homo sapiens
aatctgtgtcctttaaaaca

SEQ ID NO: 2319 - DNA, 12 bp, Homo sapiens
aagagtcccgcc

SEQ ID NO: 2320 - DNA, 16 bp, Homo sapiens
gagcatagcagacaca

SEQ ID NO: 2321 - DNA, 16 bp, Homo sapiens
tcggaaaggaatcctg

SEQ ID NO: 2322 - DNA, 16 bp, Homo sapiens
ttctgcattgcagtgg

SEQ ID NO: 2323 - DNA, 16 bp, Homo sapiens
ccccacctcggccaat

SEQ ID NO: 2324 - DNA, 16 bp, Homo sapiens
atccatgctgctatgc

SEQ ID NO: 2325 - DNA, 16 bp, Homo sapiens
gttcatccgggtcagg

SEQ ID NO: 2326 - DNA, 16 bp, Homo sapiens
tttatatgtggacacc

SEQ ID NO: 2327 - DNA, 16 bp, Homo sapiens
atgtaggactgctcaa

SEQ ID NO: 2328 - DNA, 16 bp, Homo sapiens
gaccttggtagagtcc

SEQ ID NO: 2329 - DNA, 16 bp, Homo sapiens
gaagtgctattataac

SEQ ID NO: 2330 - DNA, 14 bp, Homo sapiens
taggtcaagtctaa

SEQ ID NO: 2331 - DNA, 16 bp, Homo sapiens
aggtaagggttacttt

SEQ ID NO: 2332 - DNA, 18 bp, Homo sapiens
cctccactcctcagctgc

SEQ ID NO: 2333 - DNA, 16 bp, Homo sapiens
cttcaccccgagccat

SEQ ID NO: 2334 - DNA, 16 bp, Homo sapiens
gtaaagcagagtttgg

SEQ ID NO: 2335 - DNA, 16 bp, Homo sapiens
acgcccgctcccggct

SEQ ID NO: 2336 - DNA, 16 bp, Homo sapiens
catgaggtcgcggatg

SEQ ID NO: 2337 - DNA, 16 bp, Homo sapiens
caggatacatcaccca

SEQ ID NO: 2338 - DNA, 16 bp, Homo sapiens
tgactcggcagtcagc

SEQ ID NO: 2339 - DNA, 14 bp, Homo sapiens
ggatgcagtaatct

SEQ ID NO: 2340 - DNA, 20 bp, Homo sapiens
gaaaacttaccaccagtgtg

SEQ ID NO: 2341 - DNA, 16 bp, Homo sapiens
cttgacgacctgcttt

SEQ ID NO: 2342 - DNA, 16 bp, Homo sapiens
agtgagcagccacagg

SEQ ID NO: 2343 - DNA, 16 bp, Homo sapiens
caccgatggtccgtag

SEQ ID NO: 2344 - DNA, 16 bp, Homo sapiens
tgtatctggtgactcc

SEQ ID NO: 2345 - DNA, 14 bp, Homo sapiens
ggcaggagatgttg

SEQ ID NO: 2346 - DNA, 20 bp, Homo sapiens
agtgaggtttgttgcttgtg

SEQ ID NO: 2347 - DNA, 20 bp, Homo sapiens
gtcccatgaacttgctgatg

SEQ ID NO: 2348 - DNA, 16 bp, Homo sapiens
aggtgttctcctgggc

SEQ ID NO: 2349 - DNA, 16 bp, Homo sapiens
actcgaaggttgatgg

SEQ ID NO: 2350 - DNA, 26 bp, Homo sapiens
gagcaggtacctccaacatcaaggaa

SEQ ID NO: 2351 - DNA, 16 bp, Homo sapiens
gcacagaacagtacac

SEQ ID NO: 2352 - DNA, 16 bp, Homo sapiens
agagtgtccacctgat

SEQ ID NO: 2353 - DNA, 16 bp, Homo sapiens
atgtaagtggtgacga

SEQ ID NO: 2354 - DNA, 16 bp, Homo sapiens
cacacgaggtctcact

SEQ ID NO: 2355 - DNA, 16 bp, Homo sapiens
tgcctgagaccacgca

SEQ ID NO: 2356 - DNA, 16 bp, Homo sapiens
gcagagggagccccga

SEQ ID NO: 2357 - DNA, 16 bp, Homo sapiens
ccctattgtcccacca

SEQ ID NO: 2358 - DNA, 16 bp, Homo sapiens
atatgcagctgtcagc

SEQ ID NO: 2359 - DNA, 16 bp, Homo sapiens
cctctggcagccgagg

SEQ ID NO: 2360 - DNA, 16 bp, Homo sapiens
cacgaagggttgacac

SEQ ID NO: 2361 - DNA, 19 bp, Homo sapiens
acatccaagggaatgttta

SEQ ID NO: 2362 - DNA, 16 bp, Homo sapiens
aacgagacagcatcct

SEQ ID NO: 2363 - DNA, 16 bp, Homo sapiens
agtagatgccagaggg

SEQ ID NO: 2364 - DNA, 16 bp, Homo sapiens
ggcactcacagctgtc

SEQ ID NO: 2365 - DNA, 20 bp, Homo sapiens
tgttatatatgacagttgct

SEQ ID NO: 2366 - DNA, 18 bp, Homo sapiens
ccgcccgcctgctttctc

SEQ ID NO: 2367 - DNA, 16 bp, Homo sapiens
tgccaccctgagactc

SEQ ID NO: 2368 - DNA, 16 bp, Homo sapiens
gggaagttgatatacc

SEQ ID NO: 2369 - DNA, 16 bp, Homo sapiens
aactatgcatccacct

SEQ ID NO: 2370 - DNA, 16 bp, Homo sapiens
agggacagcagtagcg

SEQ ID NO: 2371 - DNA, 16 bp, Homo sapiens
gtgaatccaacagaca

SEQ ID NO: 2372 - DNA, 16 bp, Homo sapiens
tcctgaagtaaggtac

SEQ ID NO: 2373 - DNA, 16 bp, Homo sapiens
gcccaggaaggtcgaa

SEQ ID NO: 2374 - DNA, 16 bp, Homo sapiens
accactagattctcta

SEQ ID NO: 2375 - DNA, 16 bp, Homo sapiens
atcaatcttgggagct

SEQ ID NO: 2376 - DNA, 18 bp, Homo sapiens
tagacgagcttggtgaag

SEQ ID NO: 2377 - DNA, 16 bp, Homo sapiens
cactaccgagcccact

SEQ ID NO: 2378 - DNA, 16 bp, Homo sapiens
ccaggacagtgactcg

SEQ ID NO: 2379 - DNA, 14 bp, Homo sapiens
ggtgctgcactttg

SEQ ID NO: 2380 - DNA, 16 bp, Homo sapiens
acggagacccttacct

SEQ ID NO: 2381 - DNA, 16 bp, Homo sapiens
ggcgatggaagggcag

SEQ ID NO: 2382 - DNA, 16 bp, Homo sapiens
accacgagatcaacac

SEQ ID NO: 2383 - DNA, 16 bp, Homo sapiens
ctaattaccagctaac

SEQ ID NO: 2384 - DNA, 16 bp, Homo sapiens
gtcaataagtaactct

SEQ ID NO: 2385 - DNA, 16 bp, Homo sapiens
ggtttcaacaaacagt

SEQ ID NO: 2386 - DNA, 16 bp, Homo sapiens
tgaaatcgaagccatt

SEQ ID NO: 2387 - DNA, 20 bp, Homo sapiens
attctgtttgttgaagggag

SEQ ID NO: 2388 - DNA, 16 bp, Homo sapiens
tatatcagctcagtgc

SEQ ID NO: 2389 - DNA, 16 bp, Homo sapiens
ggagacggcacggagc

SEQ ID NO: 2390 - DNA, 16 bp, Homo sapiens
gtaaataactctcacg

SEQ ID NO: 2391 - DNA, 20 bp, Homo sapiens
actttataggccagacctcc

SEQ ID NO: 2392 - DNA, 16 bp, Homo sapiens
tgcaactatgcatcca

SEQ ID NO: 2393 - DNA, 16 bp, Homo sapiens
tgctagggacatcttc

SEQ ID NO: 2394 - DNA, 16 bp, Homo sapiens
aaatatacgggcatgt

SEQ ID NO: 2395 - DNA, 16 bp, Homo sapiens
ccctactgaagctgga

SEQ ID NO: 2396 - DNA, 18 bp, Homo sapiens
tgtttaggctcttcatag

SEQ ID NO: 2397 - DNA, 14 bp, Homo sapiens
tgatgcccctcgct

SEQ ID NO: 2398 - DNA, 18 bp, Homo sapiens
cataagcaaccgcctgaa

SEQ ID NO: 2399 - DNA, 16 bp, Homo sapiens
aggaatgacaagtggt

SEQ ID NO: 2400 - DNA, 16 bp, Homo sapiens
tatagtaacagctggg

SEQ ID NO: 2401 - DNA, 16 bp, Homo sapiens
tatatatcagctcagt

SEQ ID NO: 2402 - DNA, 16 bp, Homo sapiens
caacatcccgccaggc

SEQ ID NO: 2403 - DNA, 16 bp, Homo sapiens
tagtattcaaaaaacg

SEQ ID NO: 2404 - DNA, 18 bp, Homo sapiens
atgcaaaaggacagcaga

SEQ ID NO: 2405 - DNA, 16 bp, Homo sapiens
tgaaaaacgaatgcat

SEQ ID NO: 2406 - DNA, 16 bp, Homo sapiens
ctgccggacttcatca

SEQ ID NO: 2407 - DNA, 17 bp, Homo sapiens
cttttctattgtctgtc

SEQ ID NO: 2408 - DNA, 16 bp, Homo sapiens
gggcatggaggtgtca

SEQ ID NO: 2409 - DNA, 16 bp, Homo sapiens
tcgcggatggacttgt

SEQ ID NO: 2410 - DNA, 18 bp, Homo sapiens
taacattggagagcagcc

SEQ ID NO: 2411 - DNA, 16 bp, Homo sapiens
tgtaaactttttggac

SEQ ID NO: 2412 - DNA, 16 bp, Homo sapiens
atcttcaatcaacagc

SEQ ID NO: 2413 - DNA, 12 bp, Homo sapiens
tgcgagttgttg

SEQ ID NO: 2414 - DNA, 25 bp, Homo sapiens
cctccggttctgaaggtgttcttgt

SEQ ID NO: 2415 - DNA, 16 bp, Homo sapiens
gctcctggataaccag

SEQ ID NO: 2416 - DNA, 20 bp, Homo sapiens
acaccttcactggtccatta

SEQ ID NO: 2417 - DNA, 16 bp, Homo sapiens
ggcttaaggagatccg

SEQ ID NO: 2418 - DNA, 16 bp, Homo sapiens
ccccagagtcccgcag

SEQ ID NO: 2419 - DNA, 16 bp, Homo sapiens
acccgaatagcaagcg

SEQ ID NO: 2420 - DNA, 16 bp, Homo sapiens
tagaatggcatcttgt

SEQ ID NO: 2421 - DNA, 20 bp, Homo sapiens
catctgctggtcagcttcgg

SEQ ID NO: 2422 - DNA, 16 bp, Homo sapiens
gggcaaggccggcccg

SEQ ID NO: 2423 - DNA, 16 bp, Homo sapiens
tgaaataccatccacg

SEQ ID NO: 2424 - DNA, 16 bp, Homo sapiens
tcctgataagattcac

SEQ ID NO: 2425 - DNA, 20 bp, Homo sapiens
gtgggcagattcttgccacc

SEQ ID NO: 2426 - DNA, 12 bp, Homo sapiens
tttgaaagacac

SEQ ID NO: 2427 - DNA, 16 bp, Homo sapiens
atgagggtcaagttca

SEQ ID NO: 2428 - DNA, 18 bp, Homo sapiens
ggaagggcagggcatagg

SEQ ID NO: 2429 - DNA, 16 bp, Homo sapiens
tccaacctgtttggac

SEQ ID NO: 2430 - DNA, 18 bp, Homo sapiens
cccagagagatgacagat

SEQ ID NO: 2431 - DNA, 16 bp, Homo sapiens
tcacagggtggtcata

SEQ ID NO: 2432 - DNA, 16 bp, Homo sapiens
agaatatcaacacctt

SEQ ID NO: 2433 - DNA, 16 bp, Homo sapiens
atgatgtgtttcctgt

SEQ ID NO: 2434 - DNA, 16 bp, Homo sapiens
tgcttaatgccttgcc

SEQ ID NO: 2435 - DNA, 16 bp, Homo sapiens
tcaaaaggattaggta

SEQ ID NO: 2436 - DNA, 16 bp, Homo sapiens
aatcagcgggtgatgc

SEQ ID NO: 2437 - DNA, 16 bp, Homo sapiens
atggataattatgtcc

SEQ ID NO: 2438 - DNA, 16 bp, Homo sapiens
gttgctccccgcccgc

SEQ ID NO: 2439 - DNA, 16 bp, Homo sapiens
acgaaaccaataagac

SEQ ID NO: 2440 - DNA, 16 bp, Homo sapiens
ctatgatctatgatca

SEQ ID NO: 2441 - DNA, 16 bp, Homo sapiens
ccacatcacggatctt

SEQ ID NO: 2442 - DNA, 16 bp, Homo sapiens
cttggcccacttgacc

SEQ ID NO: 2443 - DNA, 16 bp, Homo sapiens
ccgcaatagagacacc

SEQ ID NO: 2444 - DNA, 16 bp, Homo sapiens
agaatacagagtgcag

SEQ ID NO: 2445 - DNA, 16 bp, Homo sapiens
ttaattaagctctggt

SEQ ID NO: 2446 - DNA, 16 bp, Homo sapiens
cagcacgctgtgtgca

SEQ ID NO: 2447 - DNA, 18 bp, Homo sapiens
agacactttcctgtgagc

SEQ ID NO: 2448 - DNA, 18 bp, Homo sapiens
tttacagagaagtctctt

SEQ ID NO: 2449 - DNA, 16 bp, Homo sapiens
tgcactggtgcagcac

SEQ ID NO: 2450 - DNA, 14 bp, Homo sapiens
gggcatgattccat

SEQ ID NO: 2451 - DNA, 16 bp, Homo sapiens
tgtaatcagtcaagag

SEQ ID NO: 2452 - DNA, 16 bp, Homo sapiens
gtgtatgctggacacc

SEQ ID NO: 2453 - DNA, 18 bp, Homo sapiens
atgatggatgtcacgttc

SEQ ID NO: 2454 - DNA, 16 bp, Homo sapiens
catgattgcgccgttg

SEQ ID NO: 2455 - DNA, 14 bp, Homo sapiens
tgagctacagtagg

SEQ ID NO: 2456 - DNA, 16 bp, Homo sapiens
taagtggtgacgattc

SEQ ID NO: 2457 - DNA, 16 bp, Homo sapiens
gggtgtatgctggaca

SEQ ID NO: 2458 - DNA, 16 bp, Homo sapiens
gttttccaacctgttt

SEQ ID NO: 2459 - DNA, 16 bp, Homo sapiens
gatgtaagtggtgacg

SEQ ID NO: 2460 - DNA, 16 bp, Homo sapiens
catcacggatcttgag

SEQ ID NO: 2461 - DNA, 16 bp, Homo sapiens
tgatgtgtttcctgtg

SEQ ID NO: 2462 - DNA, 12 bp, Homo sapiens
gtaagcaaggct

SEQ ID NO: 2463 - DNA, 19 bp, Homo sapiens
ttccacctttgcccaagtc

SEQ ID NO: 2464 - DNA, 16 bp, Homo sapiens
tcccactctggcaaca

SEQ ID NO: 2465 - DNA, 25 bp, Homo sapiens
gacagctgtttgcagacctcctgcc

SEQ ID NO: 2466 - DNA, 16 bp, Homo sapiens
acccaccccggagatg

SEQ ID NO: 2467 - DNA, 18 bp, Homo sapiens
tgttgcctccggttctga

SEQ ID NO: 2468 - DNA, 20 bp, Homo sapiens
tgagctgtctgtgatccagc

SEQ ID NO: 2469 - DNA, 16 bp, Homo sapiens
tggatatcagcattgg

SEQ ID NO: 2470 - DNA, 16 bp, Homo sapiens
gggtgaaaagcccggt

SEQ ID NO: 2471 - DNA, 16 bp, Homo sapiens
tacagaagggccacgg

SEQ ID NO: 2472 - DNA, 15 bp, Homo sapiens
atatttccataccat

SEQ ID NO: 2473 - DNA, 16 bp, Homo sapiens
ccgggagcaagaggca

SEQ ID NO: 2474 - DNA, 15 bp, Homo sapiens
catctccataactcc

SEQ ID NO: 2475 - DNA, 25 bp, Homo sapiens
tttgaggattgctgaattatttctt

SEQ ID NO: 2476 - DNA, 16 bp, Homo sapiens
gctgaccgggttcccc

SEQ ID NO: 2477 - DNA, 15 bp, Homo sapiens
gcagctgcaacctgg

SEQ ID NO: 2478 - DNA, 16 bp, Homo sapiens
tttattatagggcttc

SEQ ID NO: 2479 - DNA, 14 bp, Homo sapiens
tcctggtatgaaga

SEQ ID NO: 2480 - DNA, 16 bp, Homo sapiens
ggtgatacccgggagg

SEQ ID NO: 2481 - DNA, 14 bp, Homo sapiens
acagaagttgaact

SEQ ID NO: 2482 - DNA, 16 bp, Homo sapiens
ttccaacctgtttgga

SEQ ID NO: 2483 - DNA, 16 bp, Homo sapiens
cgttttccaacctgtt

SEQ ID NO: 2484 - DNA, 18 bp, Homo sapiens
ggcaccatccccaacgat

SEQ ID NO: 2485 - DNA, 16 bp, Homo sapiens
gaacatggcagccagt

SEQ ID NO: 2486 - DNA, 16 bp, Homo sapiens
agaggtcactgttggc

SEQ ID NO: 2487 - DNA, 16 bp, Homo sapiens
gcgaaaccagagagat

SEQ ID NO: 2488 - DNA, 14 bp, Homo sapiens
ctttgatgatggct

SEQ ID NO: 2489 - DNA, 16 bp, Homo sapiens
tatttaaaagggccgc

SEQ ID NO: 2490 - DNA, 16 bp, Homo sapiens
gcagagcataggagag

SEQ ID NO: 2491 - DNA, 12 bp, Homo sapiens
ccactgaacatt

SEQ ID NO: 2492 - DNA, 16 bp, Homo sapiens
gcccggtcctgactcc

SEQ ID NO: 2493 - DNA, 16 bp, Homo sapiens
ggttaatatggccggg

SEQ ID NO: 2494 - DNA, 16 bp, Homo sapiens
cccttagcccacgacc

SEQ ID NO: 2495 - DNA, 16 bp, Homo sapiens
agcaatttcattggcc

SEQ ID NO: 2496 - DNA, 16 bp, Homo sapiens
ttatacccagggcaac

SEQ ID NO: 2497 - DNA, 16 bp, Homo sapiens
cagggctctttcagct

SEQ ID NO: 2498 - DNA, 16 bp, Homo sapiens
agagatattgatgtct

SEQ ID NO: 2499 - DNA, 20 bp, Homo sapiens
tcccatttcaggagacctgg

SEQ ID NO: 2500 - DNA, 16 bp, Homo sapiens
cagcacggaacagatc

SEQ ID NO: 2501 - DNA, 16 bp, Homo sapiens
tgcaaccttgcccccc

SEQ ID NO: 2502 - DNA, 16 bp, Homo sapiens
tcattaggacacagcg

SEQ ID NO: 2503 - DNA, 16 bp, Homo sapiens
aggcacgcacagggcg

SEQ ID NO: 2504 - DNA, 20 bp, Homo sapiens
tcagatctgaagtgtcttcc

SEQ ID NO: 2505 - DNA, 16 bp, Homo sapiens
gagccccgtcctgact

SEQ ID NO: 2506 - DNA, 16 bp, Homo sapiens
agcaaaggcatagcac

SEQ ID NO: 2507 - DNA, 16 bp, Homo sapiens
ctcggaggaacgaggc

SEQ ID NO: 2508 - DNA, 20 bp, Homo sapiens
agtgactctggatttggttc

SEQ ID NO: 2509 - DNA, 16 bp, Homo sapiens
aatagggcaaggccgg

SEQ ID NO: 2510 - DNA, 16 bp, Homo sapiens
caccaggccgagagca

SEQ ID NO: 2511 - DNA, 16 bp, Homo sapiens
gtcaatacctgcacag

SEQ ID NO: 2512 - DNA, 16 bp, Homo sapiens
gcctttgcaagaaagc

SEQ ID NO: 2513 - DNA, 16 bp, Homo sapiens
gccaatttgggcatca

SEQ ID NO: 2514 - DNA, 16 bp, Homo sapiens
tgccggacttcatcaa

SEQ ID NO: 2515 - DNA, 16 bp, Homo sapiens
aggagaggaatagggc

SEQ ID NO: 2516 - DNA, 25 bp, Homo sapiens
tgttcttgtacttcatcccactgat

SEQ ID NO: 2517 - DNA, 16 bp, Homo sapiens
gtgcactctaggctta

SEQ ID NO: 2518 - DNA, 16 bp, Homo sapiens
tgctcaatgtcgatca

SEQ ID NO: 2519 - DNA, 16 bp, Homo sapiens
agcttttaaacccccc

SEQ ID NO: 2520 - DNA, 16 bp, Homo sapiens
cgaaatagcagagctc

SEQ ID NO: 2521 - DNA, 16 bp, Homo sapiens
gccagccacggctgtc

SEQ ID NO: 2522 - DNA, 16 bp, Homo sapiens
cagggatggctcggct

SEQ ID NO: 2523 - DNA, 16 bp, Homo sapiens
gcccgcacttatagaa

SEQ ID NO: 2524 - DNA, 16 bp, Homo sapiens
caccgagaaggaggta

SEQ ID NO: 2525 - DNA, 16 bp, Homo sapiens
tgtatataagacccgg

SEQ ID NO: 2526 - DNA, 18 bp, Homo sapiens
ctgaaggtgttcttgtac

SEQ ID NO: 2527 - DNA, 16 bp, Homo sapiens
ggacagactgtagccc

SEQ ID NO: 2528 - DNA, 16 bp, Homo sapiens
tctcctgccggacttc

SEQ ID NO: 2529 - DNA, 16 bp, Homo sapiens
atacactgagatcagg

SEQ ID NO: 2530 - DNA, 16 bp, Homo sapiens
agtagaaactgggacg

SEQ ID NO: 2531 - DNA, 16 bp, Homo sapiens
gtggacatcagtgagt

SEQ ID NO: 2532 - DNA, 16 bp, Homo sapiens
cagctcgatctgccgc

SEQ ID NO: 2533 - DNA, 16 bp, Homo sapiens
acaggaggagagaccc

SEQ ID NO: 2534 - DNA, 16 bp, Homo sapiens
accttggtagagtccc

SEQ ID NO: 2535 - DNA, 14 bp, Homo sapiens
aagttgccagccaa

SEQ ID NO: 2536 - DNA, 20 bp, Homo sapiens
gcttcacgtctacacactaa

SEQ ID NO: 2537 - DNA, 16 bp, Homo sapiens
aacgacctggccccgc

SEQ ID NO: 2538 - DNA, 20 bp, Homo sapiens
tcatggaccaccagtgtgcg

SEQ ID NO: 2539 - DNA, 16 bp, Homo sapiens
acaactaacggcaggc

SEQ ID NO: 2540 - DNA, 16 bp, Homo sapiens
tcccacacggctcctg

SEQ ID NO: 2541 - DNA, 18 bp, Homo sapiens
caggagcgcattggcctt

SEQ ID NO: 2542 - DNA, 16 bp, Homo sapiens
gccccgtcctgactcc

SEQ ID NO: 2543 - DNA, 16 bp, Homo sapiens
agctatcaagctagaa

SEQ ID NO: 2544 - DNA, 16 bp, Homo sapiens
taggagtgagttacct

SEQ ID NO: 2545 - DNA, 18 bp, Homo sapiens
caggagaagccgaggaag

SEQ ID NO: 2546 - DNA, 14 bp, Homo sapiens
gtcagcaggttgtg

SEQ ID NO: 2547 - DNA, 16 bp, Homo sapiens
tcaaacaaataggccg

SEQ ID NO: 2548 - DNA, 16 bp, Homo sapiens
agcctaattttgcaat

SEQ ID NO: 2549 - DNA, 16 bp, Homo sapiens
gtcgatcagcagaaga

SEQ ID NO: 2550 - DNA, 16 bp, Homo sapiens
ccagatggcagacttc

SEQ ID NO: 2551 - DNA, 16 bp, Homo sapiens
gcagaaattccctggc

SEQ ID NO: 2552 - DNA, 16 bp, Homo sapiens
actaataagatctgtt

SEQ ID NO: 2553 - DNA, 16 bp, Homo sapiens
gaaaactagacttgca

SEQ ID NO: 2554 - DNA, 21 bp, Homo sapiens
atagtggtcagtccaggagct

SEQ ID NO: 2555 - DNA, 18 bp, Homo sapiens
gccgccatttctcaacag

SEQ ID NO: 2556 - DNA, 16 bp, Homo sapiens
acgaaaaattcagatc

SEQ ID NO: 2557 - DNA, 16 bp, Homo sapiens
cctcattcaggatggt

SEQ ID NO: 2558 - DNA, 20 bp, Homo sapiens
tccaacatgcctctcttcat

SEQ ID NO: 2559 - DNA, 18 bp, Homo sapiens
ggccatctcaaacacctc

SEQ ID NO: 2560 - DNA, 20 bp, Homo sapiens
tgttgcctccggttctgaag

SEQ ID NO: 2561 - DNA, 16 bp, Homo sapiens
accgataaatgttgta

SEQ ID NO: 2562 - DNA, 20 bp, Homo sapiens
gtgcacaagttctggtgact

SEQ ID NO: 2563 - DNA, 15 bp, Homo sapiens
tcccaagcaattttg

SEQ ID NO: 2564 - DNA, 16 bp, Homo sapiens
ctttttggacttgcag

SEQ ID NO: 2565 - DNA, 16 bp, Homo sapiens
aggacagtgactcggc

SEQ ID NO: 2566 - DNA, 12 bp, Homo sapiens
accacagctagt

SEQ ID NO: 2567 - DNA, 20 bp, Homo sapiens
cacatggatgagtaaaatca

SEQ ID NO: 2568 - DNA, 16 bp, Homo sapiens
ctctgagaccacgaga

SEQ ID NO: 2569 - DNA, 16 bp, Homo sapiens
accaggacagtgactc

SEQ ID NO: 2570 - DNA, 16 bp, Homo sapiens
aggaagcaccaggata

SEQ ID NO: 2571 - DNA, 16 bp, Homo sapiens
ccccacgggcagccac

SEQ ID NO: 2572 - DNA, 20 bp, Homo sapiens
cacagtagaagtcattgacc

SEQ ID NO: 2573 - DNA, 16 bp, Homo sapiens
taagatcgcatctggg

SEQ ID NO: 2574 - DNA, 20 bp, Homo sapiens
cctcatggtcgcagggatga

SEQ ID NO: 2575 - DNA, 16 bp, Homo sapiens
atggatggatatcagc

SEQ ID NO: 2576 - DNA, 16 bp, Homo sapiens
gtctttattgcatggg

SEQ ID NO: 2577 - DNA, 16 bp, Homo sapiens
agcttactggtacact

SEQ ID NO: 2578 - DNA, 16 bp, Homo sapiens
gcacactgaatcgaca

SEQ ID NO: 2579 - DNA, 16 bp, Homo sapiens
ttttatctgggctcca

SEQ ID NO: 2580 - DNA, 18 bp, Homo sapiens
aaagatgaactccttttc

SEQ ID NO: 2581 - DNA, 16 bp, Homo sapiens
agctagagcatcagct

SEQ ID NO: 2582 - DNA, 20 bp, Homo sapiens
agaagtcattgaccaggtcg

SEQ ID NO: 2583 - DNA, 16 bp, Homo sapiens
ttcaatcatggatgga

SEQ ID NO: 2584 - DNA, 16 bp, Homo sapiens
acaataattggccaaa

SEQ ID NO: 2585 - DNA, 14 bp, Homo sapiens
atattgcatgaaca

SEQ ID NO: 2586 - DNA, 16 bp, Homo sapiens
aaaacaagtgctgctc

SEQ ID NO: 2587 - DNA, 16 bp, Homo sapiens
tgtataagctcacttt

SEQ ID NO: 2588 - DNA, 16 bp, Homo sapiens
ggttatgagattctta

SEQ ID NO: 2589 - DNA, 16 bp, Homo sapiens
atctacaactgtcccc

SEQ ID NO: 2590 - DNA, 16 bp, Homo sapiens
tcgcccgccgccgacc

SEQ ID NO: 2591 - DNA, 16 bp, Homo sapiens
caataagagattggag

SEQ ID NO: 2592 - DNA, 16 bp, Homo sapiens
gagattaagtcatccg

SEQ ID NO: 2593 - DNA, 16 bp, Homo sapiens
ggtcgacacatttcag

SEQ ID NO: 2594 - DNA, 16 bp, Homo sapiens
cctcacggtcgccgcc

SEQ ID NO: 2595 - DNA, 16 bp, Homo sapiens
cctggtcccagcatag

SEQ ID NO: 2596 - DNA, 16 bp, Homo sapiens
gggttactttgccata

SEQ ID NO: 2597 - DNA, 14 bp, Homo sapiens
cacggcccagtttc

SEQ ID NO: 2598 - DNA, 16 bp, Homo sapiens
ctctgtctcctctcgc

SEQ ID NO: 2599 - DNA, 16 bp, Homo sapiens
tattatgaatccccct

SEQ ID NO: 2600 - DNA, 16 bp, Homo sapiens
aagaagtagaagtcgg

SEQ ID NO: 2601 - DNA, 20 bp, Homo sapiens
tctccttgtcagctgtcatt

SEQ ID NO: 2602 - DNA, 16 bp, Homo sapiens
aataagagattggagc

SEQ ID NO: 2603 - DNA, 16 bp, Homo sapiens
cagctcggaggaacga

SEQ ID NO: 2604 - DNA, 16 bp, Homo sapiens
gcgcaaaaataaatca

SEQ ID NO: 2605 - DNA, 16 bp, Homo sapiens
caagtgagcagccaca

SEQ ID NO: 2606 - DNA, 20 bp, Homo sapiens
gtgtgtaagcatttctctca

SEQ ID NO: 2607 - DNA, 18 bp, Homo sapiens
cttgtcctcctccgagta

SEQ ID NO: 2608 - DNA, 16 bp, Homo sapiens
gctcactttggattgt

SEQ ID NO: 2609 - DNA, 18 bp, Homo sapiens
tttgacacaaatcttcgg

SEQ ID NO: 2610 - DNA, 16 bp, Homo sapiens
ctgagaggcatacaaa

SEQ ID NO: 2611 - DNA, 18 bp, Homo sapiens
ggaatcatattattgctt

SEQ ID NO: 2612 - DNA, 16 bp, Homo sapiens
acttatggatgcagct

SEQ ID NO: 2613 - DNA, 18 bp, Homo sapiens
gcaggtccttcttgttga

SEQ ID NO: 2614 - DNA, 20 bp, Homo sapiens
aaggctttcaggtacaagtt

SEQ ID NO: 2615 - DNA, 16 bp, Homo sapiens
gtaattcccgttctct

SEQ ID NO: 2616 - DNA, 16 bp, Homo sapiens
tgtccatgacacctgg

SEQ ID NO: 2617 - DNA, 19 bp, Homo sapiens
gtgaggacctgcactggta

SEQ ID NO: 2618 - DNA, 12 bp, Homo sapiens
atttgatgctgc

SEQ ID NO: 2619 - DNA, 16 bp, Homo sapiens
gcggatggacttgttg

SEQ ID NO: 2620 - DNA, 14 bp, Homo sapiens
ggaaatggctctgg

SEQ ID NO: 2621 - DNA, 16 bp, Homo sapiens
gcctcttctcaacggg

SEQ ID NO: 2622 - DNA, 16 bp, Homo sapiens
ccgctctgtatcttga

SEQ ID NO: 2623 - DNA, 20 bp, Homo sapiens
tctttgtactttcttcattt

SEQ ID NO: 2624 - DNA, 16 bp, Homo sapiens
gtgttgatgtaggact

SEQ ID NO: 2625 - DNA, 16 bp, Homo sapiens
tggcacacggtgattc

SEQ ID NO: 2626 - DNA, 16 bp, Homo sapiens
tcgcatagaagattcg

SEQ ID NO: 2627 - DNA, 12 bp, Homo sapiens
gacaatttctac

SEQ ID NO: 2628 - DNA, 16 bp, Homo sapiens
acacagggcaattggt

SEQ ID NO: 2629 - DNA, 16 bp, Homo sapiens
tgttggcaaacacgct

SEQ ID NO: 2630 - DNA, 20 bp, Homo sapiens
tccatggagaacaccacgtc

SEQ ID NO: 2631 - DNA, 16 bp, Homo sapiens
ttgattgaggtaaggg

SEQ ID NO: 2632 - DNA, 16 bp, Homo sapiens
cgccataggaagctgc

SEQ ID NO: 2633 - DNA, 18 bp, Homo sapiens
cgtcctgctgggtgggca

SEQ ID NO: 2634 - DNA, 16 bp, Homo sapiens
attcatggtccaccag

SEQ ID NO: 2635 - DNA, 14 bp, Homo sapiens
atctggcagaggtt

SEQ ID NO: 2636 - DNA, 14 bp, Homo sapiens
tctgcttcgcacct

SEQ ID NO: 2637 - DNA, 16 bp, Homo sapiens
gcccagtaggcaagaa

SEQ ID NO: 2638 - DNA, 16 bp, Homo sapiens
gaagatggtcacagcc

SEQ ID NO: 2639 - DNA, 16 bp, Homo sapiens
gggatccgaactggcc

SEQ ID NO: 2640 - DNA, 16 bp, Homo sapiens
catatatctcctgtta

SEQ ID NO: 2641 - DNA, 16 bp, Homo sapiens
gcaaaaactcggcatg

SEQ ID NO: 2642 - DNA, 16 bp, Homo sapiens
cgtaaacatgattcct

SEQ ID NO: 2643 - DNA, 18 bp, Homo sapiens
ggttggctttgtctttat

SEQ ID NO: 2644 - DNA, 16 bp, Homo sapiens
tggtgatacccgggag

SEQ ID NO: 2645 - DNA, 16 bp, Homo sapiens
ctacaaaatcagatag

SEQ ID NO: 2646 - DNA, 16 bp, Homo sapiens
ctagacactgacttcc

SEQ ID NO: 2647 - DNA, 16 bp, Homo sapiens
gatacccgggaggtcg

SEQ ID NO: 2648 - DNA, 20 bp, Homo sapiens
cattactttccttctgctcg

SEQ ID NO: 2649 - DNA, 16 bp, Homo sapiens
cacgatcccaaaccct

SEQ ID NO: 2650 - DNA, 12 bp, Homo sapiens
tcattccccact

SEQ ID NO: 2651 - DNA, 16 bp, Homo sapiens
cataggagatagaagg

SEQ ID NO: 2652 - DNA, 14 bp, Homo sapiens
ctgttgccacattg

SEQ ID NO: 2653 - DNA, 16 bp, Homo sapiens
ccggttctcaggcgac

SEQ ID NO: 2654 - DNA, 16 bp, Homo sapiens
agccggcacggttgct

SEQ ID NO: 2655 - DNA, 16 bp, Homo sapiens
gttgatatacccctgc

SEQ ID NO: 2656 - DNA, 16 bp, Homo sapiens
cagtgcggtgtccagc

SEQ ID NO: 2657 - DNA, 16 bp, Homo sapiens
gctcaagtgctggaga

SEQ ID NO: 2658 - DNA, 16 bp, Homo sapiens
ggacaggactttgccc

SEQ ID NO: 2659 - DNA, 16 bp, Homo sapiens
taagactatagttaac

SEQ ID NO: 2660 - DNA, 16 bp, Homo sapiens
gattaggtattatggt

SEQ ID NO: 2661 - DNA, 16 bp, Homo sapiens
gaccactgaagctcct

SEQ ID NO: 2662 - DNA, 16 bp, Homo sapiens
cccaagtccgcccagt

SEQ ID NO: 2663 - DNA, 20 bp, Homo sapiens
cccttcagcacgcacacggc

SEQ ID NO: 2664 - DNA, 16 bp, Homo sapiens
gggtttttgagaggtt

SEQ ID NO: 2665 - DNA, 16 bp, Homo sapiens
atgcacgcgctaccat

SEQ ID NO: 2666 - DNA, 20 bp, Homo sapiens
tactttcttcatttccacct

SEQ ID NO: 2667 - DNA, 16 bp, Homo sapiens
gtattacccagtggct

SEQ ID NO: 2668 - DNA, 12 bp, Homo sapiens
ttagcactggcc

SEQ ID NO: 2669 - DNA, 16 bp, Homo sapiens
tgttatatgtgtggca

SEQ ID NO: 2670 - DNA, 16 bp, Homo sapiens
tcttgattgaggtaag

SEQ ID NO: 2671 - DNA, 18 bp, Homo sapiens
tggctgcagcttccgaga

SEQ ID NO: 2672 - DNA, 20 bp, Homo sapiens
taattcttcaccctgcagta

SEQ ID NO: 2673 - DNA, 16 bp, Homo sapiens
cacaatcctggctatc

SEQ ID NO: 2674 - DNA, 16 bp, Homo sapiens
ttgaagatggcgaaga

SEQ ID NO: 2675 - DNA, 20 bp, Homo sapiens
gtgctgccaccaggtgggtc

SEQ ID NO: 2676 - DNA, 16 bp, Homo sapiens
agtgatggaaccccgg

SEQ ID NO: 2677 - DNA, 16 bp, Homo sapiens
gtgcggtgtccagcca

SEQ ID NO: 2678 - DNA, 16 bp, Homo sapiens
ctaaagaccactaatt

SEQ ID NO: 2679 - DNA, 16 bp, Homo sapiens
tgcaaggcggaaagag

SEQ ID NO: 2680 - DNA, 16 bp, Homo sapiens
gcccagtggccgccct

SEQ ID NO: 2681 - DNA, 16 bp, Homo sapiens
ggacatcacactcctc

SEQ ID NO: 2682 - DNA, 15 bp, Homo sapiens
ccaatcaggggctgg

SEQ ID NO: 2683 - DNA, 16 bp, Homo sapiens
atgcatggaggcaccc

SEQ ID NO: 2684 - DNA, 20 bp, Homo sapiens
gtactttcttcatttccacc

SEQ ID NO: 2685 - DNA, 20 bp, Homo sapiens
ttttatccaaataaatgcca

SEQ ID NO: 2686 - DNA, 16 bp, Homo sapiens
ctctatcacagggccc

SEQ ID NO: 2687 - DNA, 20 bp, Homo sapiens
tgcccaagtctccaacatgc

SEQ ID NO: 2688 - DNA, 16 bp, Homo sapiens
ttacagtggtcaaact

SEQ ID NO: 2689 - DNA, 15 bp, Homo sapiens
gactggattccaatc

SEQ ID NO: 2690 - DNA, 16 bp, Homo sapiens
aatgaggctgctctcc

SEQ ID NO: 2691 - DNA, 16 bp, Homo sapiens
gcatagcactaaacta

SEQ ID NO: 2692 - DNA, 16 bp, Homo sapiens
ttgtagtgggtcacgc

SEQ ID NO: 2693 - DNA, 16 bp, Homo sapiens
ttgatgtaggactgct

SEQ ID NO: 2694 - DNA, 16 bp, Homo sapiens
actagtaactttccag

SEQ ID NO: 2695 - DNA, 16 bp, Homo sapiens
agttccaccctgtccc

SEQ ID NO: 2696 - DNA, 16 bp, Homo sapiens
tgtcatatggccaggg

SEQ ID NO: 2697 - DNA, 16 bp, Homo sapiens
aaaaaagccggcacgg

SEQ ID NO: 2698 - DNA, 18 bp, Homo sapiens
taaagtgctggtgtgtga

SEQ ID NO: 2699 - DNA, 20 bp, Homo sapiens
ttcttcatttccacctttgc

SEQ ID NO: 2700 - DNA, 16 bp, Homo sapiens
ccatatgcagctgtca

SEQ ID NO: 2701 - DNA, 16 bp, Homo sapiens
tgacaaccaggtgagg

SEQ ID NO: 2702 - DNA, 16 bp, Homo sapiens
ttgaagctagggagac

SEQ ID NO: 2703 - DNA, 16 bp, Homo sapiens
ggtgtatgctggacac

SEQ ID NO: 2704 - DNA, 16 bp, Homo sapiens
gcccaggcaccgacca

SEQ ID NO: 2705 - DNA, 16 bp, Homo sapiens
accctcaacgacctgg

SEQ ID NO: 2706 - DNA, 16 bp, Homo sapiens
gcggcccccggcccga

SEQ ID NO: 2707 - DNA, 18 bp, Homo sapiens
atgaggaggcaggtcttc

SEQ ID NO: 2708 - DNA, 16 bp, Homo sapiens
agaagtgctattataa

SEQ ID NO: 2709 - DNA, 16 bp, Homo sapiens
ccctattccacaggac

SEQ ID NO: 2710 - DNA, 16 bp, Homo sapiens
gaatactattctaaca

SEQ ID NO: 2711 - DNA, 18 bp, Homo sapiens
tcgatgatgccggtggtg

SEQ ID NO: 2712 - DNA, 16 bp, Homo sapiens
gtaagtggtgacgatt

SEQ ID NO: 2713 - DNA, 20 bp, Homo sapiens
ttgcaaaagtaatagatttg

SEQ ID NO: 2714 - DNA, 16 bp, Homo sapiens
aattctggtctggctt

SEQ ID NO: 2715 - DNA, 16 bp, Homo sapiens
agatgcaatgtccagt

SEQ ID NO: 2716 - DNA, 16 bp, Homo sapiens
ggagacgcagctctca

SEQ ID NO: 2717 - DNA, 16 bp, Homo sapiens
ctcaacgggagcaact

SEQ ID NO: 2718 - DNA, 16 bp, Homo sapiens
tatgctggacaccggt

SEQ ID NO: 2719 - DNA, 16 bp, Homo sapiens
gatggacttgttgatg

SEQ ID NO: 2720 - DNA, 20 bp, Homo sapiens
tgagaattttatccaaataa

SEQ ID NO: 2721 - DNA, 16 bp, Homo sapiens
gcacaaacaggcccgc

SEQ ID NO: 2722 - DNA, 16 bp, Homo sapiens
gcaaaccgcttctcac

SEQ ID NO: 2723 - DNA, 16 bp, Homo sapiens
ctaaatatagcaggga

SEQ ID NO: 2724 - DNA, 18 bp, Homo sapiens
gatggactccagagtcat

SEQ ID NO: 2725 - DNA, 16 bp, Homo sapiens
tgtccttgatctggta

SEQ ID NO: 2726 - DNA, 16 bp, Homo sapiens
tctgatgcaacatggc

SEQ ID NO: 2727 - DNA, 16 bp, Homo sapiens
actatcaaccatctta

SEQ ID NO: 2728 - DNA, 16 bp, Homo sapiens
acctatcaagggctgt

SEQ ID NO: 2729 - DNA, 16 bp, Homo sapiens
tgaattctggtctggc

SEQ ID NO: 2730 - DNA, 16 bp, Homo sapiens
agttataaaccctggg

SEQ ID NO: 2731 - DNA, 16 bp, Homo sapiens
catttataacaggcca

SEQ ID NO: 2732 - DNA, 16 bp, Homo sapiens
ccccccgagagcacgc

SEQ ID NO: 2733 - DNA, 16 bp, Homo sapiens
gtacactgcctaactg

SEQ ID NO: 2734 - DNA, 16 bp, Homo sapiens
catgatgctgcaatca

SEQ ID NO: 2735 - DNA, 16 bp, Homo sapiens
gaagatggtcactcaa

SEQ ID NO: 2736 - DNA, 16 bp, Homo sapiens
tactggtacactgcct

SEQ ID NO: 2737 - DNA, 16 bp, Homo sapiens
gctcagggttaccttg

SEQ ID NO: 2738 - DNA, 16 bp, Homo sapiens
tgttatcatttggcag

SEQ ID NO: 2739 - DNA, 14 bp, Homo sapiens
tttgggaggtggtc

SEQ ID NO: 2740 - DNA, 16 bp, Homo sapiens
cacaagtagccttggc

SEQ ID NO: 2741 - DNA, 16 bp, Homo sapiens
atgcgattgattcggg

SEQ ID NO: 2742 - DNA, 16 bp, Homo sapiens
gtaaattacggtttac

SEQ ID NO: 2743 - DNA, 16 bp, Homo sapiens
ggctggtttagtaagg

SEQ ID NO: 2744 - DNA, 18 bp, Homo sapiens
cagtttgccgctgcccaa

SEQ ID NO: 2745 - DNA, 16 bp, Homo sapiens
gagattggagcctggt

SEQ ID NO: 2746 - DNA, 20 bp, Homo sapiens
tcacaaatcagcaccaagca

SEQ ID NO: 2747 - DNA, 16 bp, Homo sapiens
tacaaacaggtatggc

SEQ ID NO: 2748 - DNA, 16 bp, Homo sapiens
tgtgattgcaggccag

SEQ ID NO: 2749 - DNA, 23 bp, Homo sapiens
agtcagtcctttaatgcttcccc

SEQ ID NO: 2750 - DNA, 16 bp, Homo sapiens
tgatacccgggaggtc

SEQ ID NO: 2751 - DNA, 16 bp, Homo sapiens
caccacaatttgctct

SEQ ID NO: 2752 - DNA, 20 bp, Homo sapiens
cgcacagtgtcagtgacatc

SEQ ID NO: 2753 - DNA, 16 bp, Homo sapiens
catgtccttgatctgg

SEQ ID NO: 2754 - DNA, 15 bp, Homo sapiens
tactttccttctgct

SEQ ID NO: 2755 - DNA, 16 bp, Homo sapiens
gtttattatagggctt

SEQ ID NO: 2756 - DNA, 20 bp, Homo sapiens
gttgcattcaatgttctgac

SEQ ID NO: 2757 - DNA, 16 bp, Homo sapiens
caacaagctatcacac

SEQ ID NO: 2758 - DNA, 18 bp, Homo sapiens
ctaagcagaagttccaat

SEQ ID NO: 2759 - DNA, 20 bp, Homo sapiens
ggaagtggcaactgatgagc

SEQ ID NO: 2760 - DNA, 20 bp, Homo sapiens
tcaaggaagatggcatttct

SEQ ID NO: 2761 - DNA, 19 bp, Homo sapiens
tttctggatagaggattaa

SEQ ID NO: 2762 - DNA, 18 bp, Homo sapiens
gtacacattttggtgagc

SEQ ID NO: 2763 - DNA, 16 bp, Homo sapiens
tcatatgtatgggttt

SEQ ID NO: 2764 - DNA, 16 bp, Homo sapiens
ctcataacatttgacg

SEQ ID NO: 2765 - DNA, 20 bp, Homo sapiens
gtgctggcctggccacagca

SEQ ID NO: 2766 - DNA, 20 bp, Homo sapiens
ctccggttctgaaggtgttc

SEQ ID NO: 2767 - DNA, 18 bp, Homo sapiens
cccggcctgaggccctgc

SEQ ID NO: 2768 - DNA, 16 bp, Homo sapiens
agcattaacagagcag

SEQ ID NO: 2769 - DNA, 16 bp, Homo sapiens
ggactgctcaatgtcg

SEQ ID NO: 2770 - DNA, 18 bp, Homo sapiens
aagtagtccaccaggtgc

SEQ ID NO: 2771 - DNA, 25 bp, Homo sapiens
tgcacatatcattacaccagttcgt

SEQ ID NO: 2772 - DNA, 14 bp, Homo sapiens
aggccctctagctg

SEQ ID NO: 2773 - DNA, 16 bp, Homo sapiens
gtgacagccagaatga

SEQ ID NO: 2774 - DNA, 15 bp, Homo sapiens
ttagttgctgctctt

SEQ ID NO: 2775 - DNA, 20 bp, Homo sapiens
tttgtactttcttcatttcc

SEQ ID NO: 2776 - DNA, 16 bp, Homo sapiens
ggtcagttgctgcagg

SEQ ID NO: 2777 - DNA, 16 bp, Homo sapiens
gacacacggtggacaa

SEQ ID NO: 2778 - DNA, 16 bp, Homo sapiens
tcctgccggacttcat

SEQ ID NO: 2779 - DNA, 16 bp, Homo sapiens
aaacaggatacgagac

SEQ ID NO: 2780 - DNA, 16 bp, Homo sapiens
gtagagatgggaacca

SEQ ID NO: 2781 - DNA, 16 bp, Homo sapiens
accttaatcacttagc

SEQ ID NO: 2782 - DNA, 16 bp, Homo sapiens
tcgaagccattactgc

SEQ ID NO: 2783 - DNA, 16 bp, Homo sapiens
gggcactgcacaaagc

SEQ ID NO: 2784 - DNA, 16 bp, Homo sapiens
ccagactgtggagcca

SEQ ID NO: 2785 - DNA, 18 bp, Homo sapiens
atttgaacaacataatac

SEQ ID NO: 2786 - DNA, 18 bp, Homo sapiens
gttgacagattgagccag

SEQ ID NO: 2787 - DNA, 20 bp, Homo sapiens
cgtcgcccttcagcacgcac

SEQ ID NO: 2788 - DNA, 16 bp, Homo sapiens
ctacacacgaggtctc

SEQ ID NO: 2789 - DNA, 16 bp, Homo sapiens
ccggagagctccagag

SEQ ID NO: 2790 - DNA, 16 bp, Homo sapiens
gtaattgacaagcagt

SEQ ID NO: 2791 - DNA, 12 bp, Homo sapiens
ttgttcttagga

SEQ ID NO: 2792 - DNA, 16 bp, Homo sapiens
aatcatagcctcaaac

SEQ ID NO: 2793 - DNA, 20 bp, Homo sapiens
tcctgtactgtcctgtggtg

SEQ ID NO: 2794 - DNA, 20 bp, Homo sapiens
gtccacctacctcttctcaa

SEQ ID NO: 2795 - DNA, 20 bp, Homo sapiens
ctccaacatgcctctcttca

SEQ ID NO: 2796 - DNA, 21 bp, Homo sapiens
ttctcaggaatttgtgtcttt

SEQ ID NO: 2797 - DNA, 16 bp, Homo sapiens
ggccaagggtggccat

SEQ ID NO: 2798 - DNA, 14 bp, Homo sapiens
cacacctcttgaac

SEQ ID NO: 2799 - DNA, 20 bp, Homo sapiens
atcatccattgggatatagg

SEQ ID NO: 2800 - DNA, 16 bp, Homo sapiens
ccaaagaggatggccg

SEQ ID NO: 2801 - DNA, 16 bp, Homo sapiens
ccccacgggaacagga

SEQ ID NO: 2802 - DNA, 16 bp, Homo sapiens
ggtcaacgcaggctca

SEQ ID NO: 2803 - DNA, 16 bp, Homo sapiens
ggcccccccgagagca

SEQ ID NO: 2804 - DNA, 16 bp, Homo sapiens
cacaatggcctcgaat

SEQ ID NO: 2805 - DNA, 16 bp, Homo sapiens
gtgaaagtaaatgctg

SEQ ID NO: 2806 - DNA, 16 bp, Homo sapiens
ggcctagcaaaggcac

SEQ ID NO: 2807 - DNA, 16 bp, Homo sapiens
gatacagccgttcata

SEQ ID NO: 2808 - DNA, 16 bp, Homo sapiens
actgacttggccatcc

SEQ ID NO: 2809 - DNA, 24 bp, Homo sapiens
gataggtggtatcaacatctgtaa

SEQ ID NO: 2810 - DNA, 16 bp, Homo sapiens
gaagccccctgcacac

SEQ ID NO: 2811 - DNA, 16 bp, Homo sapiens
gcctgaaacaagtgcc

SEQ ID NO: 2812 - DNA, 14 bp, Homo sapiens
ctttacagcttcca

SEQ ID NO: 2813 - DNA, 16 bp, Homo sapiens
caccagaactttatta

SEQ ID NO: 2814 - DNA, 16 bp, Homo sapiens
tccatccttgagcttg

SEQ ID NO: 2815 - DNA, 14 bp, Homo sapiens
ttcagcatgctttc

SEQ ID NO: 2816 - DNA, 16 bp, Homo sapiens
tgttgatgtaggactg

SEQ ID NO: 2817 - DNA, 16 bp, Homo sapiens
gacggaaccgctctgt

SEQ ID NO: 2818 - DNA, 16 bp, Homo sapiens
gtaaatgtatctggtt

SEQ ID NO: 2819 - DNA, 16 bp, Homo sapiens
cgccaggtgaaactga

SEQ ID NO: 2820 - DNA, 20 bp, Homo sapiens
tgcacttcatcctcatgaag

SEQ ID NO: 2821 - DNA, 12 bp, Homo sapiens
tatttacccaaa

SEQ ID NO: 2822 - DNA, 16 bp, Homo sapiens
gctaaatgtggactga

SEQ ID NO: 2823 - DNA, 16 bp, Homo sapiens
ccttggtagagtcccc

SEQ ID NO: 2824 - DNA, 16 bp, Homo sapiens
tcaattacttacaaga

SEQ ID NO: 2825 - DNA, 16 bp, Homo sapiens
ggagatactatcagta

SEQ ID NO: 2826 - DNA, 16 bp, Homo sapiens
gaaagtaggcttctgt

SEQ ID NO: 2827 - DNA, 16 bp, Homo sapiens
gggagatgtgctcttt

SEQ ID NO: 2828 - DNA, 16 bp, Homo sapiens
acttactaaagcgcag

SEQ ID NO: 2829 - DNA, 16 bp, Homo sapiens
ccgaagtgagagggtc

SEQ ID NO: 2830 - DNA, 16 bp, Homo sapiens
ggccagtacctggtcc

SEQ ID NO: 2831 - DNA, 16 bp, Homo sapiens
aatgataaggacccca

SEQ ID NO: 2832 - DNA, 16 bp, Homo sapiens
gtaagtttattatagg

SEQ ID NO: 2833 - DNA, 20 bp, Homo sapiens
catcggccacaccatctttg

SEQ ID NO: 2834 - DNA, 16 bp, Homo sapiens
gtatttgtagtgtgga

SEQ ID NO: 2835 - DNA, 14 bp, Homo sapiens
gggcttcttccatt

SEQ ID NO: 2836 - DNA, 16 bp, Homo sapiens
cactaaatatagcagg

SEQ ID NO: 2837 - DNA, 18 bp, Homo sapiens
agtctggatggcggttgt

SEQ ID NO: 2838 - DNA, 16 bp, Homo sapiens
tcctaatggtgactca

SEQ ID NO: 2839 - DNA, 14 bp, Homo sapiens
aaaagagcttggtg

SEQ ID NO: 2840 - DNA, 16 bp, Homo sapiens
ggtcactgttggcaaa

SEQ ID NO: 2841 - DNA, 16 bp, Homo sapiens
gcaattggtactgtac

SEQ ID NO: 2842 - DNA, 12 bp, Homo sapiens
cagtttattcaa

SEQ ID NO: 2843 - DNA, 18 bp, Homo sapiens
ttcctcagaccgaacggg

SEQ ID NO: 2844 - DNA, 20 bp, Homo sapiens
agaaaatatattgtgcaatt

SEQ ID NO: 2845 - DNA, 22 bp, Homo sapiens
gcctccggttctgaaggtgttc

SEQ ID NO: 2846 - DNA, 18 bp, Homo sapiens
ccccaatacagattcact

SEQ ID NO: 2847 - DNA, 18 bp, Homo sapiens
ctcccgcactccctcctt

SEQ ID NO: 2848 - DNA, 16 bp, Homo sapiens
gagatttgtgctgctt

SEQ ID NO: 2849 - DNA, 16 bp, Homo sapiens
aggcacttacagtggt

SEQ ID NO: 2850 - DNA, 16 bp, Homo sapiens
tcattcaggatggtgt

SEQ ID NO: 2851 - DNA, 20 bp, Homo sapiens
tgtttttgaggattgctgaa

SEQ ID NO: 2852 - DNA, 16 bp, Homo sapiens
ctggtacactgcctaa

SEQ ID NO: 2853 - DNA, 16 bp, Homo sapiens
caacagagtaatgatg

SEQ ID NO: 2854 - DNA, 16 bp, Homo sapiens
gagtgggtgaggtctc

SEQ ID NO: 2855 - DNA, 12 bp, Homo sapiens
ctgcactgacga

SEQ ID NO: 2856 - DNA, 16 bp, Homo sapiens
caccaccctgggttta

SEQ ID NO: 2857 - DNA, 12 bp, Homo sapiens
tcatggtgatgc

SEQ ID NO: 2858 - DNA, 16 bp, Homo sapiens
cactagaatcccggag

SEQ ID NO: 2859 - DNA, 16 bp, Homo sapiens
gtaatcaaggcagcaa

SEQ ID NO: 2860 - DNA, 16 bp, Homo sapiens
ggtaataagtcacact

SEQ ID NO: 2861 - DNA, 16 bp, Homo sapiens
tgtaactttcagcagt

SEQ ID NO: 2862 - DNA, 16 bp, Homo sapiens
gccggctgggcgcagc

SEQ ID NO: 2863 - DNA, 18 bp, Homo sapiens
tgctactgtcactaaggc

SEQ ID NO: 2864 - DNA, 16 bp, Homo sapiens
gatccgaactggccga

SEQ ID NO: 2865 - DNA, 18 bp, Homo sapiens
ttcctgtgagccagaagt

SEQ ID NO: 2866 - DNA, 20 bp, Homo sapiens
ttgatcaagcagagaaagcc

SEQ ID NO: 2867 - DNA, 16 bp, Homo sapiens
tgtacttgcgggtttt

SEQ ID NO: 2868 - DNA, 19 bp, Homo sapiens
gctacagttctgccagaga

SEQ ID NO: 2869 - DNA, 16 bp, Homo sapiens
tttattcacagggtcc

SEQ ID NO: 2870 - DNA, 16 bp, Homo sapiens
tacaaaagagtatagc

SEQ ID NO: 2871 - DNA, 16 bp, Homo sapiens
acaaatgagtagttcc

SEQ ID NO: 2872 - DNA, 16 bp, Homo sapiens
gcgaatgccatgctta

SEQ ID NO: 2873 - DNA, 16 bp, Homo sapiens
ctaaactaaccatggg

SEQ ID NO: 2874 - DNA, 20 bp, Homo sapiens
gcttttcttttagttgctgc

SEQ ID NO: 2875 - DNA, 20 bp, Homo sapiens
aaatttcatatccaggctgt

SEQ ID NO: 2876 - DNA, 18 bp, Homo sapiens
cgagaaacatgatggatg

SEQ ID NO: 2877 - DNA, 16 bp, Homo sapiens
gtcgagcagggatggc

SEQ ID NO: 2878 - DNA, 16 bp, Homo sapiens
caagaatgaattctgg

SEQ ID NO: 2879 - DNA, 18 bp, Homo sapiens
tactcaggtgtgccgcaa

SEQ ID NO: 2880 - DNA, 16 bp, Homo sapiens
tactattcgacagagc

SEQ ID NO: 2881 - DNA, 16 bp, Homo sapiens
aataatgagaccccac

SEQ ID NO: 2882 - DNA, 14 bp, Homo sapiens
gcaggagatgttgg

SEQ ID NO: 2883 - DNA, 16 bp, Homo sapiens
acaagtaaatgtatct

SEQ ID NO: 2884 - DNA, 17 bp, Homo sapiens
ccgccatttctcaacag

SEQ ID NO: 2885 - DNA, 16 bp, Homo sapiens
tacatgaacagtctgt

SEQ ID NO: 2886 - DNA, 16 bp, Homo sapiens
gtgaagatctctggtg

SEQ ID NO: 2887 - DNA, 20 bp, Homo sapiens
ccttcagcacgcacacggcc

SEQ ID NO: 2888 - DNA, 14 bp, Homo sapiens
ctgtcacacttgct

SEQ ID NO: 2889 - DNA, 16 bp, Homo sapiens
gccaaaggcctgatac

SEQ ID NO: 2890 - DNA, 16 bp, Homo sapiens
agcattggtatcaggc

SEQ ID NO: 2891 - DNA, 15 bp, Homo sapiens
aatagctcatggatt

SEQ ID NO: 2892 - DNA, 16 bp, Homo sapiens
ggcttaattaagctct

SEQ ID NO: 2893 - DNA, 16 bp, Homo sapiens
atgtactgtgagcttc

SEQ ID NO: 2894 - DNA, 16 bp, Homo sapiens
aagagcaacattaagt

SEQ ID NO: 2895 - DNA, 16 bp, Homo sapiens
agaaactgtactggtc

SEQ ID NO: 2896 - DNA, 16 bp, Homo sapiens
cttggtagagtccccc

SEQ ID NO: 2897 - DNA, 16 bp, Homo sapiens
ttagatctcattacct

SEQ ID NO: 2898 - DNA, 16 bp, Homo sapiens
agtgtatataagaccc

SEQ ID NO: 2899 - DNA, 16 bp, Homo sapiens
ggccatactatattca

SEQ ID NO: 2900 - DNA, 16 bp, Homo sapiens
cttatagaaggcctgc

SEQ ID NO: 2901 - DNA, 16 bp, Homo sapiens
agtcacacctagaaat

SEQ ID NO: 2902 - DNA, 20 bp, Homo sapiens
tttcttcatttccacctttg

SEQ ID NO: 2903 - DNA, 12 bp, Homo sapiens
gtcaaattctat

SEQ ID NO: 2904 - DNA, 25 bp, Homo sapiens
agagaatgggatccagtatacttac

SEQ ID NO: 2905 - DNA, 16 bp, Homo sapiens
accaagtgagcagcca

SEQ ID NO: 2906 - DNA, 25 bp, Homo sapiens
ctgaaggtgttcttgtacttcatcc

SEQ ID NO: 2907 - DNA, 20 bp, Homo sapiens
agtcactgtgtggcacatgt

SEQ ID NO: 2908 - DNA, 18 bp, Homo sapiens
cggatcatggcctgcatg

SEQ ID NO: 2909 - DNA, 20 bp, Homo sapiens
atccaaaaggcccaatacag

SEQ ID NO: 2910 - DNA, 16 bp, Homo sapiens
gcattccacgggcagc

SEQ ID NO: 2911 - DNA, 16 bp, Homo sapiens
tgaaaatcaaaattga

SEQ ID NO: 2912 - DNA, 16 bp, Homo sapiens
gagaagtggccgccca

SEQ ID NO: 2913 - DNA, 16 bp, Homo sapiens
gggcccctttgcgcag

SEQ ID NO: 2914 - DNA, 18 bp, Homo sapiens
gatgaactcccgcgccgc

SEQ ID NO: 2915 - DNA, 14 bp, Homo sapiens
caaatgctatcgat

SEQ ID NO: 2916 - DNA, 12 bp, Homo sapiens
agagcgcattcc

SEQ ID NO: 2917 - DNA, 16 bp, Homo sapiens
ccaacctgtttggact

SEQ ID NO: 2918 - DNA, 16 bp, Homo sapiens
tgtggttaatatggcc

SEQ ID NO: 2919 - DNA, 16 bp, Homo sapiens
acggaaggttctggtt

SEQ ID NO: 2920 - DNA, 16 bp, Homo sapiens
ctggccgagatgggat

SEQ ID NO: 2921 - DNA, 16 bp, Homo sapiens
ccccggaacctcaggc

SEQ ID NO: 2922 - DNA, 14 bp, Homo sapiens
taagtgtccctttg

SEQ ID NO: 2923 - DNA, 20 bp, Homo sapiens
aggccatttctgtgtgtaag

SEQ ID NO: 2924 - DNA, 16 bp, Homo sapiens
aacaatcatagcctca

SEQ ID NO: 2925 - DNA, 16 bp, Homo sapiens
gacttatacccagggc

SEQ ID NO: 2926 - DNA, 16 bp, Homo sapiens
tttgagaggttgacta

SEQ ID NO: 2927 - DNA, 20 bp, Homo sapiens
cacaattacacttttaagat

SEQ ID NO: 2928 - DNA, 20 bp, Homo sapiens
tctccaacatgcctctcttc

SEQ ID NO: 2929 - DNA, 13 bp, Homo sapiens
ggttcagaccagg

SEQ ID NO: 2930 - DNA, 16 bp, Homo sapiens
atatacccctgcaccc

SEQ ID NO: 2931 - DNA, 16 bp, Homo sapiens
acagatgaagctacca

SEQ ID NO: 2932 - DNA, 16 bp, Homo sapiens
aaaatgggtctgctgg

SEQ ID NO: 2933 - DNA, 16 bp, Homo sapiens
tacattctggctttgg

SEQ ID NO: 2934 - DNA, 16 bp, Homo sapiens
gcagatcctgccttgg

SEQ ID NO: 2935 - DNA, 16 bp, Homo sapiens
agtaagtttattatag

SEQ ID NO: 2936 - DNA, 16 bp, Homo sapiens
gtgtaaataactctca

SEQ ID NO: 2937 - DNA, 20 bp, Homo sapiens
cttcagcacgcacacggcct

SEQ ID NO: 2938 - DNA, 16 bp, Homo sapiens
agggttactttgccat

SEQ ID NO: 2939 - DNA, 16 bp, Homo sapiens
tgacatgcgggaatga

SEQ ID NO: 2940 - DNA, 15 bp, Homo sapiens
gactatagcacccag

SEQ ID NO: 2941 - DNA, 16 bp, Homo sapiens
gaagagacagcatacc

SEQ ID NO: 2942 - DNA, 14 bp, Homo sapiens
cacgcagcttggcc

SEQ ID NO: 2943 - DNA, 20 bp, Homo sapiens
ttccacctttgcccaagtca

SEQ ID NO: 2944 - DNA, 12 bp, Homo sapiens
gggacttcacac

SEQ ID NO: 2945 - DNA, 16 bp, Homo sapiens
ctcggctgggcggata

SEQ ID NO: 2946 - DNA, 16 bp, Homo sapiens
ggctatacagatgatg

SEQ ID NO: 2947 - DNA, 13 bp, Homo sapiens
gctagcctctgga

SEQ ID NO: 2948 - DNA, 18 bp, Homo sapiens
cacagagaagttgttgag

SEQ ID NO: 2949 - DNA, 16 bp, Homo sapiens
gtaggatgatcttgtt

SEQ ID NO: 2950 - DNA, 16 bp, Homo sapiens
tcctactggatacaga

SEQ ID NO: 2951 - DNA, 16 bp, Homo sapiens
aacattcatgtccatg

SEQ ID NO: 2952 - DNA, 16 bp, Homo sapiens
tgttattccgaacagt

SEQ ID NO: 2953 - DNA, 16 bp, Homo sapiens
ggacagtgactcggca

SEQ ID NO: 2954 - DNA, 24 bp, Homo sapiens
cccattttgtgaatgttttctttt

SEQ ID NO: 2955 - DNA, 20 bp, Homo sapiens
agagttcagccttcctctaa

SEQ ID NO: 2956 - DNA, 14 bp, Homo sapiens
tgaacacgctatcc

SEQ ID NO: 2957 - DNA, 18 bp, Homo sapiens
tgactcatccatccttca

SEQ ID NO: 2958 - DNA, 16 bp, Homo sapiens
ggatattcttaacagg

SEQ ID NO: 2959 - DNA, 16 bp, Homo sapiens
cggatggacttgttga

SEQ ID NO: 2960 - DNA, 16 bp, Homo sapiens
gagaggaatagggcaa

SEQ ID NO: 2961 - DNA, 16 bp, Homo sapiens
aggacggctcctcacc

SEQ ID NO: 2962 - DNA, 16 bp, Homo sapiens
gctaatgggaagttga

SEQ ID NO: 2963 - DNA, 20 bp, Homo sapiens
ttcaggacttccaggaagcg

SEQ ID NO: 2964 - DNA, 16 bp, Homo sapiens
tcccggctcggcctca

SEQ ID NO: 2965 - DNA, 16 bp, Homo sapiens
tggcagaataatcctg

SEQ ID NO: 2966 - DNA, 16 bp, Homo sapiens
tgggaatgcctccatt

SEQ ID NO: 2967 - DNA, 16 bp, Homo sapiens
gttgaagatggcgaag

SEQ ID NO: 2968 - DNA, 16 bp, Homo sapiens
cgacagacaagtacca

SEQ ID NO: 2969 - DNA, 16 bp, Homo sapiens
aaggaagtcccggccc

SEQ ID NO: 2970 - DNA, 16 bp, Homo sapiens
gaaaagtcggcattcc

SEQ ID NO: 2971 - DNA, 16 bp, Homo sapiens
acttatagaaggcctg

SEQ ID NO: 2972 - DNA, 18 bp, Homo sapiens
cgtctccatggcccggat

SEQ ID NO: 2973 - DNA, 16 bp, Homo sapiens
taagatagagggtctt

SEQ ID NO: 2974 - DNA, 18 bp, Homo sapiens
cgttgatccgcttggact

SEQ ID NO: 2975 - DNA, 16 bp, Homo sapiens
gagtcccccccaggct

SEQ ID NO: 2976 - DNA, 14 bp, Homo sapiens
gcccatgatgccat

SEQ ID NO: 2977 - DNA, 16 bp, Homo sapiens
aaccagccagataaac

SEQ ID NO: 2978 - DNA, 16 bp, Homo sapiens
cacatcacggatcttg

SEQ ID NO: 2979 - DNA, 16 bp, Homo sapiens
gcacaatatcattaac

SEQ ID NO: 2980 - DNA, 20 bp, Homo sapiens
cctccggttctgaaggtgtt

SEQ ID NO: 2981 - DNA, 14 bp, Homo sapiens
ggtgacaggcgact

SEQ ID NO: 2982 - DNA, 20 bp, Homo sapiens
taggccagacctccgcgcct

SEQ ID NO: 2983 - DNA, 16 bp, Homo sapiens
agcccctgtgaggtca

SEQ ID NO: 2984 - DNA, 16 bp, Homo sapiens
ctccaggacacaccgt

SEQ ID NO: 2985 - DNA, 16 bp, Homo sapiens
caacagagggactgct

SEQ ID NO: 2986 - DNA, 20 bp, Homo sapiens
ttgtacttactatcatgatg

SEQ ID NO: 2987 - DNA, 16 bp, Homo sapiens
ccccggagagctccag

SEQ ID NO: 2988 - DNA, 16 bp, Homo sapiens
caagaccccccgccac

SEQ ID NO: 2989 - DNA, 16 bp, Homo sapiens
gtattattcccagcta

SEQ ID NO: 2990 - DNA, 16 bp, Homo sapiens
gccatatgcagctgtc

SEQ ID NO: 2991 - DNA, 16 bp, Homo sapiens
cgggaaggactatgta

SEQ ID NO: 2992 - DNA, 16 bp, Homo sapiens
acagatcttgcatgtt

SEQ ID NO: 2993 - DNA, 16 bp, Homo sapiens
ggctggacccctcatt

SEQ ID NO: 2994 - DNA, 16 bp, Homo sapiens
gcccatcggctgctgt

SEQ ID NO: 2995 - DNA, 16 bp, Homo sapiens
cttagaaggaagtagg

SEQ ID NO: 2996 - DNA, 16 bp, Homo sapiens
gaccgtggccagctct

SEQ ID NO: 2997 - DNA, 16 bp, Homo sapiens
ctaactgtattgatta

SEQ ID NO: 2998 - DNA, 12 bp, Homo sapiens
ggtcctggtatg

SEQ ID NO: 2999 - DNA, 16 bp, Homo sapiens
aaagaagtgctattat

SEQ ID NO: 3000 - DNA, 16 bp, Homo sapiens
accaataactgacctc

SEQ ID NO: 3001 - DNA, 16 bp, Homo sapiens
gtttacatgatgttct

SEQ ID NO: 3002 - DNA, 16 bp, Homo sapiens
cagtgctgcacggatg

SEQ ID NO: 3003 - DNA, 16 bp, Homo sapiens
gttatgaacctatcaa

SEQ ID NO: 3004 - DNA, 16 bp, Homo sapiens
tgtatctggttcaatt

SEQ ID NO: 3005 - DNA, 16 bp, Homo sapiens
cgcatacagccttttt

SEQ ID NO: 3006 - DNA, 14 bp, Homo sapiens
gagatacacctcca

SEQ ID NO: 3007 - DNA, 16 bp, Homo sapiens
aagatatgtggttttg

SEQ ID NO: 3008 - DNA, 20 bp, Homo sapiens
ctaatggtgacaactgatcg

SEQ ID NO: 3009 - DNA, 14 bp, Homo sapiens
gaataggttaaggc

SEQ ID NO: 3010 - DNA, 16 bp, Homo sapiens
cactacagacatccct

SEQ ID NO: 3011 - DNA, 18 bp, Homo sapiens
cccctccgacgcttgttc

SEQ ID NO: 3012 - DNA, 16 bp, Homo sapiens
ctaccgagcccactgg

SEQ ID NO: 3013 - DNA, 16 bp, Homo sapiens
tcagtatagtaacagc

SEQ ID NO: 3014 - DNA, 16 bp, Homo sapiens
gtaaaactcaggctga

SEQ ID NO: 3015 - DNA, 19 bp, Homo sapiens
agctagcaggataacagat

SEQ ID NO: 3016 - DNA, 16 bp, Homo sapiens
acattaaaggctcgaa

SEQ ID NO: 3017 - DNA, 16 bp, Homo sapiens
agtcactgatcctaaa

SEQ ID NO: 3018 - DNA, 16 bp, Homo sapiens
tttggactgttttccc

SEQ ID NO: 3019 - DNA, 19 bp, Homo sapiens
atctttgtcagcagtcaca

SEQ ID NO: 3020 - DNA, 16 bp, Homo sapiens
ggccagacattgctgt

SEQ ID NO: 3021 - DNA, 16 bp, Homo sapiens
tctgagaccacgagat

SEQ ID NO: 3022 - DNA, 20 bp, Homo sapiens
tttgtatttagcatgttccc

SEQ ID NO: 3023 - DNA, 20 bp, Homo sapiens
agtgtctccaagtccagctc

SEQ ID NO: 3024 - DNA, 16 bp, Homo sapiens
gattatagcaatgcct

SEQ ID NO: 3025 - DNA, 16 bp, Homo sapiens
agggattttaggaggt

SEQ ID NO: 3026 - DNA, 16 bp, Homo sapiens
attattcaggtctcca

SEQ ID NO: 3027 - DNA, 22 bp, Homo sapiens
cttttagttgctgctcttttcc

SEQ ID NO: 3028 - DNA, 20 bp, Homo sapiens
ctgtggacatgtctttgctt

SEQ ID NO: 3029 - DNA, 25 bp, Homo sapiens
ttgtacttcatcccactgattctga

SEQ ID NO: 3030 - DNA, 15 bp, Homo sapiens
gggatgctgacttgg

SEQ ID NO: 3031 - DNA, 16 bp, Homo sapiens
cttaacaagtagtatt

SEQ ID NO: 3032 - DNA, 16 bp, Homo sapiens
cgattaactatatcta

SEQ ID NO: 3033 - DNA, 14 bp, Homo sapiens
ctgatcctgcactg

SEQ ID NO: 3034 - DNA, 16 bp, Homo sapiens
ctgtcagcatgatagg

SEQ ID NO: 3035 - DNA, 16 bp, Homo sapiens
caccgctaccctagct

SEQ ID NO: 3036 - DNA, 16 bp, Homo sapiens
ggctattccactgcag

SEQ ID NO: 3037 - DNA, 23 bp, Homo sapiens
ccatctgatcatcaggtggcata

SEQ ID NO: 3038 - DNA, 16 bp, Homo sapiens
ggatggacttgttgat

SEQ ID NO: 3039 - DNA, 16 bp, Homo sapiens
agaccttggtagagtc

SEQ ID NO: 3040 - DNA, 16 bp, Homo sapiens
cgccagcctagtggcc

SEQ ID NO: 3041 - DNA, 20 bp, Homo sapiens
ttagggtagcccaaatccca

SEQ ID NO: 3042 - DNA, 16 bp, Homo sapiens
ggattatagcaatgcc

SEQ ID NO: 3043 - DNA, 20 bp, Homo sapiens
cctcagactacatccaaggg

SEQ ID NO: 3044 - DNA, 16 bp, Homo sapiens
agcataaaagcactct

SEQ ID NO: 3045 - DNA, 16 bp, Homo sapiens
acatattaatgcagtg

SEQ ID NO: 3046 - DNA, 16 bp, Homo sapiens
cctgcacctccttgtt

SEQ ID NO: 3047 - DNA, 16 bp, Homo sapiens
gttgatagtcggttgt

SEQ ID NO: 3048 - DNA, 16 bp, Homo sapiens
aaccaggcttccggac

SEQ ID NO: 3049 - DNA, 16 bp, Homo sapiens
catcatctataccatc

SEQ ID NO: 3050 - DNA, 16 bp, Homo sapiens
cacgggaacaggaatc

SEQ ID NO: 3051 - DNA, 18 bp, Homo sapiens
gttaggcaaattaatggt

SEQ ID NO: 3052 - DNA, 16 bp, Homo sapiens
ctccatggtgagagtg

SEQ ID NO: 3053 - DNA, 20 bp, Homo sapiens
aaagtgatgtagtagctgca

SEQ ID NO: 3054 - DNA, 12 bp, Homo sapiens
actgatcctgca

SEQ ID NO: 3055 - DNA, 12 bp, Homo sapiens
cctgaaactgca

SEQ ID NO: 3056 - DNA, 16 bp, Homo sapiens
aaccgctctgtatctt

SEQ ID NO: 3057 - DNA, 20 bp, Homo sapiens
aagtgccatacagggttttt

SEQ ID NO: 3058 - DNA, 16 bp, Homo sapiens
gggtaggaactgagct

SEQ ID NO: 3059 - DNA, 16 bp, Homo sapiens
gggaatgtattaccca

SEQ ID NO: 3060 - DNA, 16 bp, Homo sapiens
agcttaagcagcaaat

SEQ ID NO: 3061 - DNA, 20 bp, Homo sapiens
cgaggactgcaacggaaacc

SEQ ID NO: 3062 - DNA, 16 bp, Homo sapiens
ctggatgtgggaacgg

SEQ ID NO: 3063 - DNA, 16 bp, Homo sapiens
gacaatcatatcacca

SEQ ID NO: 3064 - DNA, 16 bp, Homo sapiens
gtaaattactattcga

SEQ ID NO: 3065 - DNA, 18 bp, Homo sapiens
ttttcttccctaccccgc

SEQ ID NO: 3066 - DNA, 16 bp, Homo sapiens
acacagagggtgcgaa

SEQ ID NO: 3067 - DNA, 16 bp, Homo sapiens
ctggccgatggagctg

SEQ ID NO: 3068 - DNA, 15 bp, Homo sapiens
cctctggatttgatg

SEQ ID NO: 3069 - DNA, 12 bp, Homo sapiens
tcagccagacag

SEQ ID NO: 3070 - DNA, 20 bp, Homo sapiens
acccaccatcaccctctgtg

SEQ ID NO: 3071 - DNA, 16 bp, Homo sapiens
cgggaagcatccctgg

SEQ ID NO: 3072 - DNA, 16 bp, Homo sapiens
aatgtatctggttcaa

SEQ ID NO: 3073 - DNA, 16 bp, Homo sapiens
caacatatatctcctg

SEQ ID NO: 3074 - DNA, 16 bp, Homo sapiens
atgtccttgatctggt

SEQ ID NO: 3075 - DNA, 16 bp, Homo sapiens
tgaaaagcccggtcct

SEQ ID NO: 3076 - DNA, 19 bp, Homo sapiens
tcgcccttcagcacgcaca

SEQ ID NO: 3077 - DNA, 16 bp, Homo sapiens
ggctctaggacgagcg

SEQ ID NO: 3078 - DNA, 16 bp, Homo sapiens
catgagcccaccactc

SEQ ID NO: 3079 - DNA, 15 bp, Homo sapiens
atatacctgtggact

SEQ ID NO: 3080 - DNA, 16 bp, Homo sapiens
aggcagaaattttgcg

SEQ ID NO: 3081 - DNA, 16 bp, Homo sapiens
agaacaagggaacacg

SEQ ID NO: 3082 - DNA, 16 bp, Homo sapiens
ataataataaccaccg

SEQ ID NO: 3083 - DNA, 25 bp, Homo sapiens
ctgacaacagtttgccgctgcccaa

SEQ ID NO: 3084 - DNA, 18 bp, Homo sapiens
cttcacctcatcgctcag

SEQ ID NO: 3085 - DNA, 18 bp, Homo sapiens
tgtagaggatcttgagcg

SEQ ID NO: 3086 - DNA, 16 bp, Homo sapiens
ttgaattgtggaccaa

SEQ ID NO: 3087 - DNA, 16 bp, Homo sapiens
agccgttgctccccgc

SEQ ID NO: 3088 - DNA, 16 bp, Homo sapiens
gccgggaaggactatg

SEQ ID NO: 3089 - DNA, 16 bp, Homo sapiens
agctattcaacactga

SEQ ID NO: 3090 - DNA, 16 bp, Homo sapiens
tgctatagaacaggag

SEQ ID NO: 3091 - DNA, 16 bp, Homo sapiens
ggtggctaaagagtac

SEQ ID NO: 3092 - DNA, 16 bp, Homo sapiens
gtttaagcgatctcct

SEQ ID NO: 3093 - DNA, 16 bp, Homo sapiens
tcaaatttgttgttgc

SEQ ID NO: 3094 - DNA, 16 bp, Homo sapiens
taaaaacgcagctgga

SEQ ID NO: 3095 - DNA, 20 bp, Homo sapiens
atcttcttaaaaataattcg

SEQ ID NO: 3096 - DNA, 16 bp, Homo sapiens
agcactacaatcattc

SEQ ID NO: 3097 - DNA, 16 bp, Homo sapiens
taagtttattataggg

SEQ ID NO: 3098 - DNA, 20 bp, Homo sapiens
aaggtgtgacatggacagtg

SEQ ID NO: 3099 - DNA, 16 bp, Homo sapiens
tcagttatcactgtca

SEQ ID NO: 3100 - DNA, 16 bp, Homo sapiens
tatttattcacagggt

SEQ ID NO: 3101 - DNA, 16 bp, Homo sapiens
ccctataaatatctca

SEQ ID NO: 3102 - DNA, 16 bp, Homo sapiens
gcgatatacctttctg

SEQ ID NO: 3103 - DNA, 16 bp, Homo sapiens
tacattaaaggctcga

SEQ ID NO: 3104 - DNA, 16 bp, Homo sapiens
tgtaaagcagagtttg

SEQ ID NO: 3105 - DNA, 16 bp, Homo sapiens
gaagaaagtctgtact

SEQ ID NO: 3106 - DNA, 16 bp, Homo sapiens
caaactgagcgaggag

SEQ ID NO: 3107 - DNA, 16 bp, Homo sapiens
ctccaactgtagggct

SEQ ID NO: 3108 - DNA, 15 bp, Homo sapiens
aatgtctgttaggca

SEQ ID NO: 3109 - DNA, 16 bp, Homo sapiens
ggtttaagcgatctcc

SEQ ID NO: 3110 - DNA, 20 bp, Homo sapiens
gacttcaccaccatgttgga

SEQ ID NO: 3111 - DNA, 17 bp, Homo sapiens
ttttctagactttatga

SEQ ID NO: 3112 - DNA, 16 bp, Homo sapiens
tccacatcacggatct

SEQ ID NO: 3113 - DNA, 20 bp, Homo sapiens
cgacctgagctttgttgtag

SEQ ID NO: 3114 - DNA, 16 bp, Homo sapiens
ggccagctcgatctgc

SEQ ID NO: 3115 - DNA, 20 bp, Homo sapiens
atttccacctttgcccaagt

SEQ ID NO: 3116 - DNA, 16 bp, Homo sapiens
cctaatatctctaggg

SEQ ID NO: 3117 - DNA, 16 bp, Homo sapiens
acaaatggatgaggcc

SEQ ID NO: 3118 - DNA, 16 bp, Homo sapiens
tcattagtacgccagg

SEQ ID NO: 3119 - DNA, 16 bp, Homo sapiens
atggactacagtctgt

SEQ ID NO: 3120 - DNA, 15 bp, Homo sapiens
aaggcaaccacactg

SEQ ID NO: 3121 - DNA, 16 bp, Homo sapiens
gacgaaaaattcagat

SEQ ID NO: 3122 - DNA, 16 bp, Homo sapiens
agattaagtcatccgg

SEQ ID NO: 3123 - DNA, 16 bp, Homo sapiens
atcatgtccttgatct

SEQ ID NO: 3124 - DNA, 16 bp, Homo sapiens
aaacagtgcatagtta

SEQ ID NO: 3125 - DNA, 25 bp, Homo sapiens
gccatcctggagttcctgtaagata

SEQ ID NO: 3126 - DNA, 16 bp, Homo sapiens
ggataattcaatacac

SEQ ID NO: 3127 - DNA, 18 bp, Homo sapiens
gtccagaagagtagaaat

SEQ ID NO: 3128 - DNA, 16 bp, Homo sapiens
aggaacccatcatggt

SEQ ID NO: 3129 - DNA, 16 bp, Homo sapiens
agaggcccccaagacc

SEQ ID NO: 3130 - DNA, 16 bp, Homo sapiens
ttggtagagtcccccc

SEQ ID NO: 3131 - DNA, 14 bp, Homo sapiens
cagtgtgcacacag

SEQ ID NO: 3132 - DNA, 16 bp, Homo sapiens
tggtcccccctctgcc

SEQ ID NO: 3133 - DNA, 16 bp, Homo sapiens
aatacagagtgcaggc

SEQ ID NO: 3134 - DNA, 14 bp, Homo sapiens
actggctgtacatc

SEQ ID NO: 3135 - DNA, 12 bp, Homo sapiens
ttatgcaaatca

SEQ ID NO: 3136 - DNA, 16 bp, Homo sapiens
gtatttaaaagggccg

SEQ ID NO: 3137 - DNA, 16 bp, Homo sapiens
gtgctgcacggatgtc

SEQ ID NO: 3138 - DNA, 16 bp, Homo sapiens
acgcagaaggcttgca

SEQ ID NO: 3139 - DNA, 16 bp, Homo sapiens
gatcaccaggatctcc

SEQ ID NO: 3140 - DNA, 16 bp, Homo sapiens
tgtgggtttttgagag

SEQ ID NO: 3141 - DNA, 16 bp, Homo sapiens
gagtgtccacctgatc

SEQ ID NO: 3142 - DNA, 16 bp, Homo sapiens
ttttttatgaccgtgg

SEQ ID NO: 3143 - DNA, 16 bp, Homo sapiens
aatgtcgatcagcaga

SEQ ID NO: 3144 - DNA, 16 bp, Homo sapiens
ggaactgagcttctcg

SEQ ID NO: 3145 - DNA, 18 bp, Homo sapiens
acgttcttctccgagtgc

SEQ ID NO: 3146 - DNA, 16 bp, Homo sapiens
gaacgataggccaggc

SEQ ID NO: 3147 - DNA, 12 bp, Homo sapiens
gtcgatctcctc

SEQ ID NO: 3148 - DNA, 16 bp, Homo sapiens
cgtggtggatgaaggc

SEQ ID NO: 3149 - DNA, 16 bp, Homo sapiens
atccactgaatagtat

SEQ ID NO: 3150 - DNA, 19 bp, Homo sapiens
tattgggcgatcccaatta

SEQ ID NO: 3151 - DNA, 16 bp, Homo sapiens
aacctaggaggacatc

SEQ ID NO: 3152 - DNA, 16 bp, Homo sapiens
gggaaagaagtgctat

SEQ ID NO: 3153 - DNA, 16 bp, Homo sapiens
ggtaggaactgagctt

SEQ ID NO: 3154 - DNA, 16 bp, Homo sapiens
gtattatggtatgtga

SEQ ID NO: 3155 - DNA, 16 bp, Homo sapiens
ttgacgacctgctttt

SEQ ID NO: 3156 - DNA, 16 bp, Homo sapiens
ggttttcacggccagc

SEQ ID NO: 3157 - DNA, 16 bp, Homo sapiens
tgagaagatatgctga

SEQ ID NO: 3158 - DNA, 16 bp, Homo sapiens
cagcactttgtccggg

SEQ ID NO: 3159 - DNA, 16 bp, Homo sapiens
ataaattgtcatcacc

SEQ ID NO: 3160 - DNA, 16 bp, Homo sapiens
acacatgtggaacacg

SEQ ID NO: 3161 - DNA, 16 bp, Homo sapiens
gaacagacagggttca

SEQ ID NO: 3162 - DNA, 16 bp, Homo sapiens
aaagaaactaaggccg

SEQ ID NO: 3163 - DNA, 16 bp, Homo sapiens
tcctgctaatgggaag

SEQ ID NO: 3164 - DNA, 16 bp, Homo sapiens
cagcgggttctccagc

SEQ ID NO: 3165 - DNA, 16 bp, Homo sapiens
aggatatttggctggg

SEQ ID NO: 3166 - DNA, 12 bp, Homo sapiens
gctgcaacatga

SEQ ID NO: 3167 - DNA, 16 bp, Homo sapiens
tattaaggacaacctc

SEQ ID NO: 3168 - DNA, 16 bp, Homo sapiens
cggcaggtgagtgtca

SEQ ID NO: 3169 - DNA, 16 bp, Homo sapiens
tgccgaggagtatagg

SEQ ID NO: 3170 - DNA, 12 bp, Homo sapiens
atatacatgaca

SEQ ID NO: 3171 - DNA, 16 bp, Homo sapiens
cgccgagaaggaggct

SEQ ID NO: 3172 - DNA, 16 bp, Homo sapiens
tcagagaggttcgcag

SEQ ID NO: 3173 - DNA, 16 bp, Homo sapiens
caagatgcaatttgtc

SEQ ID NO: 3174 - DNA, 16 bp, Homo sapiens
agatatctagatggcc

SEQ ID NO: 3175 - DNA, 20 bp, Homo sapiens
ctctctgtaggcccgcttgg

SEQ ID NO: 3176 - DNA, 16 bp, Homo sapiens
atcaagactctgaata

SEQ ID NO: 3177 - DNA, 14 bp, Homo sapiens
gccacgtgggcagc

SEQ ID NO: 3178 - DNA, 16 bp, Homo sapiens
actgtattgattagct

SEQ ID NO: 3179 - DNA, 16 bp, Homo sapiens
aggttgactacaaagg

SEQ ID NO: 3180 - DNA, 12 bp, Homo sapiens
ctggctgtacat

SEQ ID NO: 3181 - DNA, 12 bp, Homo sapiens
tggtcaaaaggg

SEQ ID NO: 3182 - DNA, 16 bp, Homo sapiens
tcatatccatgcccac

SEQ ID NO: 3183 - DNA, 16 bp, Homo sapiens
acttatccgattttgc

SEQ ID NO: 3184 - DNA, 16 bp, Homo sapiens
caacatgccttccagt

SEQ ID NO: 3185 - DNA, 15 bp, Homo sapiens
gaacaaacagaagaa

SEQ ID NO: 3186 - DNA, 18 bp, Homo sapiens
cctccgaacggctgcctc

SEQ ID NO: 3187 - DNA, 16 bp, Homo sapiens
ccccaagaccccccgc

SEQ ID NO: 3188 - DNA, 16 bp, Homo sapiens
taatgatgagttcctt

SEQ ID NO: 3189 - DNA, 16 bp, Homo sapiens
gagaaggtgttctcct

SEQ ID NO: 3190 - DNA, 16 bp, Homo sapiens
aggcaatgagctagag

SEQ ID NO: 3191 - DNA, 20 bp, Homo sapiens
aagttcagcagggccaggac

SEQ ID NO: 3192 - DNA, 16 bp, Homo sapiens
gcgaatgtggccgttc

SEQ ID NO: 3193 - DNA, 21 bp, Homo sapiens
attacaccagttcgtcccttt

SEQ ID NO: 3194 - DNA, 12 bp, Homo sapiens
atcttgtaatgg

SEQ ID NO: 3195 - DNA, 14 bp, Homo sapiens
cgctccaggttcca

SEQ ID NO: 3196 - DNA, 16 bp, Homo sapiens
aactgtattgattagc

SEQ ID NO: 3197 - DNA, 16 bp, Homo sapiens
ccatacccaggagatc

SEQ ID NO: 3198 - DNA, 15 bp, Homo sapiens
ctgttaggcaaatta

SEQ ID NO: 3199 - DNA, 20 bp, Homo sapiens
gctcaggtggcctggtccag

SEQ ID NO: 3200 - DNA, 16 bp, Homo sapiens
cctcagggacgacttc

SEQ ID NO: 3201 - DNA, 16 bp, Homo sapiens
accatatgctcagcac

SEQ ID NO: 3202 - DNA, 16 bp, Homo sapiens
gagaacattcgcccca

SEQ ID NO: 3203 - DNA, 16 bp, Homo sapiens
cctcagagagaggccg

SEQ ID NO: 3204 - DNA, 18 bp, Homo sapiens
gctgaacatccctgctgg

SEQ ID NO: 3205 - DNA, 16 bp, Homo sapiens
ggctctagagggccca

SEQ ID NO: 3206 - DNA, 14 bp, Homo sapiens
agttactttggtgt

SEQ ID NO: 3207 - DNA, 16 bp, Homo sapiens
accaagtgggcaccta

SEQ ID NO: 3208 - DNA, 16 bp, Homo sapiens
ccgagatgggatctga

SEQ ID NO: 3209 - DNA, 14 bp, Homo sapiens
gcaggttgtgcagg

SEQ ID NO: 3210 - DNA, 16 bp, Homo sapiens
atcattaggacacagc

SEQ ID NO: 3211 - DNA, 20 bp, Homo sapiens
ggattcttttaatagcctca

SEQ ID NO: 3212 - DNA, 16 bp, Homo sapiens
tgctttctaaggttgg

SEQ ID NO: 3213 - DNA, 16 bp, Homo sapiens
aggcaagcacaagctg

SEQ ID NO: 3214 - DNA, 16 bp, Homo sapiens
acatcacggatcttga

SEQ ID NO: 3215 - DNA, 16 bp, Homo sapiens
tggtaacttgctcagg

SEQ ID NO: 3216 - DNA, 16 bp, Homo sapiens
gggatgataacacagc

SEQ ID NO: 3217 - DNA, 18 bp, Homo sapiens
gttcagcttctgttagcc

SEQ ID NO: 3218 - DNA, 16 bp, Homo sapiens
gttcaacagaagagta

SEQ ID NO: 3219 - DNA, 16 bp, Homo sapiens
ggcacatgggctcagc

SEQ ID NO: 3220 - DNA, 22 bp, Homo sapiens
ggcgtttggagtggtagaaatc

SEQ ID NO: 3221 - DNA, 26 bp, Homo sapiens
atttctagtttggagatggcagtttc

SEQ ID NO: 3222 - DNA, 18 bp, Homo sapiens
agtccaggagctaggtca

SEQ ID NO: 3223 - DNA, 16 bp, Homo sapiens
atcattgggtgaagac

SEQ ID NO: 3224 - DNA, 16 bp, Homo sapiens
agtggtcaaactgagc

SEQ ID NO: 3225 - DNA, 14 bp, Homo sapiens
tcatcttgtgaaac

SEQ ID NO: 3226 - DNA, 16 bp, Homo sapiens
gctagaggagcggcac

SEQ ID NO: 3227 - DNA, 16 bp, Homo sapiens
gacaaatgggtctcga

SEQ ID NO: 3228 - DNA, 16 bp, Homo sapiens
ggccgaatgcttgagg

SEQ ID NO: 3229 - DNA, 16 bp, Homo sapiens
gttcactacagacatc

SEQ ID NO: 3230 - DNA, 16 bp, Homo sapiens
ttcaaaggagcttgtg

SEQ ID NO: 3231 - DNA, 16 bp, Homo sapiens
cgacacccgacccgag

SEQ ID NO: 3232 - DNA, 18 bp, Homo sapiens
ttccagccattgtgttga

SEQ ID NO: 3233 - DNA, 18 bp, Homo sapiens
acagcgtggcttctctca

SEQ ID NO: 3234 - DNA, 16 bp, Homo sapiens
gaacactgatcactac

SEQ ID NO: 3235 - DNA, 16 bp, Homo sapiens
tcgacacatttcagac

SEQ ID NO: 3236 - DNA, 16 bp, Homo sapiens
ccctagggagctgcaa

SEQ ID NO: 3237 - DNA, 16 bp, Homo sapiens
acaaatcccactatat

SEQ ID NO: 3238 - DNA, 16 bp, Homo sapiens
acagtagaggccagct

SEQ ID NO: 3239 - DNA, 16 bp, Homo sapiens
gtttttgagaggttga

SEQ ID NO: 3240 - DNA, 16 bp, Homo sapiens
gtgaatggaactttta

SEQ ID NO: 3241 - DNA, 12 bp, Homo sapiens
agtatcggttgg

SEQ ID NO: 3242 - DNA, 16 bp, Homo sapiens
aattaagcaagaaacg

SEQ ID NO: 3243 - DNA, 20 bp, Homo sapiens
tccaccctcttcttcttgat

SEQ ID NO: 3244 - DNA, 20 bp, Homo sapiens
ctgagcattctgcaaagcta

SEQ ID NO: 3245 - DNA, 16 bp, Homo sapiens
gaacgaacaacaccta

SEQ ID NO: 3246 - DNA, 16 bp, Homo sapiens
cctggctctaggacga

SEQ ID NO: 3247 - DNA, 20 bp, Homo sapiens
aactgagttaatcccatgta

SEQ ID NO: 3248 - DNA, 16 bp, Homo sapiens
gaacttactgtctccc

SEQ ID NO: 3249 - DNA, 18 bp, Homo sapiens
cagaccgaacgggctcct

SEQ ID NO: 3250 - DNA, 16 bp, Homo sapiens
tcaagatgagctcccc

SEQ ID NO: 3251 - DNA, 16 bp, Homo sapiens
ggaagatgtccttgct

SEQ ID NO: 3252 - DNA, 16 bp, Homo sapiens
gctacaatgcctagga

SEQ ID NO: 3253 - DNA, 16 bp, Homo sapiens
gattaggagacaagcc

SEQ ID NO: 3254 - DNA, 16 bp, Homo sapiens
acgcagatagacaccc

SEQ ID NO: 3255 - DNA, 16 bp, Homo sapiens
ccctagtgaacttccc

SEQ ID NO: 3256 - DNA, 18 bp, Homo sapiens
cttgagctcgcgccgggc

SEQ ID NO: 3257 - DNA, 18 bp, Homo sapiens
ctgctagcctctggattt

SEQ ID NO: 3258 - DNA, 16 bp, Homo sapiens
ggagtataggtaggcc

SEQ ID NO: 3259 - DNA, 16 bp, Homo sapiens
ccggatattgactgga

SEQ ID NO: 3260 - DNA, 16 bp, Homo sapiens
tatcatatagggagaa

SEQ ID NO: 3261 - DNA, 16 bp, Homo sapiens
ctaaatcaatcttggg

SEQ ID NO: 3262 - DNA, 16 bp, Homo sapiens
cgaatgccaagtccgg

SEQ ID NO: 3263 - DNA, 16 bp, Homo sapiens
caatagggaagagcta

SEQ ID NO: 3264 - DNA, 16 bp, Homo sapiens
aacttatggatgcagc

SEQ ID NO: 3265 - DNA, 18 bp, Homo sapiens
gatccacttcctccgctc

SEQ ID NO: 3266 - DNA, 16 bp, Homo sapiens
tgagcttctcggcaca

SEQ ID NO: 3267 - DNA, 16 bp, Homo sapiens
ccagaaacggtcagtg

SEQ ID NO: 3268 - DNA, 15 bp, Homo sapiens
ttttctagactttat

SEQ ID NO: 3269 - DNA, 16 bp, Homo sapiens
taggaactgagcttct

SEQ ID NO: 3270 - DNA, 16 bp, Homo sapiens
agctaggaaggatatt

SEQ ID NO: 3271 - DNA, 16 bp, Homo sapiens
tgaggtcgcggatgga

SEQ ID NO: 3272 - DNA, 16 bp, Homo sapiens
gtgcaggcacttacag

SEQ ID NO: 3273 - DNA, 16 bp, Homo sapiens
caccagtggctgtctg

SEQ ID NO: 3274 - DNA, 16 bp, Homo sapiens
aagtgctattataact

SEQ ID NO: 3275 - DNA, 18 bp, Homo sapiens
tgctagcctctggatttg

SEQ ID NO: 3276 - DNA, 18 bp, Homo sapiens
gctgaagttcccaggctg

SEQ ID NO: 3277 - DNA, 12 bp, Homo sapiens
tctacaccaggt

SEQ ID NO: 3278 - DNA, 16 bp, Homo sapiens
ccgcaggtaggtgcca

SEQ ID NO: 3279 - DNA, 16 bp, Homo sapiens
tcataataggccgggt

SEQ ID NO: 3280 - DNA, 12 bp, Homo sapiens
gttgaactgcta

SEQ ID NO: 3281 - DNA, 16 bp, Homo sapiens
tggcatgaggtcgcgg

SEQ ID NO: 3282 - DNA, 15 bp, Homo sapiens
ttgcctccggttctg

SEQ ID NO: 3283 - DNA, 12 bp, Homo sapiens
gtggcaaccaca

SEQ ID NO: 3284 - DNA, 16 bp, Homo sapiens
agctacggtctgagca

SEQ ID NO: 3285 - DNA, 16 bp, Homo sapiens
ttacagaagactggtt

SEQ ID NO: 3286 - DNA, 15 bp, Homo sapiens
tgactgtgtactcag

SEQ ID NO: 3287 - DNA, 16 bp, Homo sapiens
cacactcacgcatgtt

SEQ ID NO: 3288 - DNA, 16 bp, Homo sapiens
tagggcaaggccggcc

SEQ ID NO: 3289 - DNA, 16 bp, Homo sapiens
aggcaccttggtgata

SEQ ID NO: 3290 - DNA, 16 bp, Homo sapiens
tcgataggaactcctt

SEQ ID NO: 3291 - DNA, 25 bp, Homo sapiens
tgcctccggttctgaaggtgttctt

SEQ ID NO: 3292 - DNA, 20 bp, Homo sapiens
ctcctcaggtggcttgtcag

SEQ ID NO: 3293 - DNA, 20 bp, Homo sapiens
atctgtcaaatcgcctgcag

SEQ ID NO: 3294 - DNA, 16 bp, Homo sapiens
agacatgtaactccct

SEQ ID NO: 3295 - DNA, 16 bp, Homo sapiens
cctacagcggccatgg

SEQ ID NO: 3296 - DNA, 18 bp, Homo sapiens
tgctagtaacatcctggc

SEQ ID NO: 3297 - DNA, 16 bp, Homo sapiens
ggcaaggacagccgac

SEQ ID NO: 3298 - DNA, 16 bp, Homo sapiens
tctgattagtccatgc

SEQ ID NO: 3299 - DNA, 16 bp, Homo sapiens
atcttctgcagtgtgg

SEQ ID NO: 3300 - DNA, 16 bp, Homo sapiens
gcaaagtgtaaagcag

SEQ ID NO: 3301 - DNA, 16 bp, Homo sapiens
caacgacctggccccg

SEQ ID NO: 3302 - DNA, 18 bp, Homo sapiens
ttcggagaccttcctgta

SEQ ID NO: 3303 - DNA, 16 bp, Homo sapiens
ttgcagattagcaggg

SEQ ID NO: 3304 - DNA, 16 bp, Homo sapiens
actcacatggcctgat

SEQ ID NO: 3305 - DNA, 16 bp, Homo sapiens
gatgtaggactgctca

SEQ ID NO: 3306 - DNA, 16 bp, Homo sapiens
aacgattagggactca

SEQ ID NO: 3307 - DNA, 16 bp, Homo sapiens
cctcaggccgccccat

SEQ ID NO: 3308 - DNA, 16 bp, Homo sapiens
cgttttagttttccta

SEQ ID NO: 3309 - DNA, 16 bp, Homo sapiens
gctcattgtaaacagt

SEQ ID NO: 3310 - DNA, 16 bp, Homo sapiens
gtgaaattcactccat

SEQ ID NO: 3311 - DNA, 16 bp, Homo sapiens
acgggagcaacttgtt

SEQ ID NO: 3312 - DNA, 16 bp, Homo sapiens
ccgcacacccctcggt

SEQ ID NO: 3313 - DNA, 16 bp, Homo sapiens
agatatattgctgggc

SEQ ID NO: 3314 - DNA, 16 bp, Homo sapiens
acttatacccagggca

SEQ ID NO: 3315 - DNA, 16 bp, Homo sapiens
acggcctgggcacacg

SEQ ID NO: 3316 - DNA, 16 bp, Homo sapiens
caagatcctacatgta

SEQ ID NO: 3317 - DNA, 16 bp, Homo sapiens
tgggagtggtactgca

SEQ ID NO: 3318 - DNA, 18 bp, Homo sapiens
gaaacgtggcattttgtg

SEQ ID NO: 3319 - DNA, 16 bp, Homo sapiens
ttgcagcacagggtca

SEQ ID NO: 3320 - DNA, 20 bp, Homo sapiens
actgatcgaaggaacgtaac

SEQ ID NO: 3321 - DNA, 14 bp, Homo sapiens
atgagggtcttcat

SEQ ID NO: 3322 - DNA, 16 bp, Homo sapiens
tgacagaccccaaagt

SEQ ID NO: 3323 - DNA, 16 bp, Homo sapiens
atgctggcaaccaagg

SEQ ID NO: 3324 - DNA, 14 bp, Homo sapiens
tggagcgcagggtg

SEQ ID NO: 3325 - DNA, 16 bp, Homo sapiens
gcccattggcccatcg

SEQ ID NO: 3326 - DNA, 14 bp, Homo sapiens
aagttctagctgtg

SEQ ID NO: 3327 - DNA, 12 bp, Homo sapiens
accggccaccac

SEQ ID NO: 3328 - DNA, 15 bp, Homo sapiens
gaaatgggtttttcc

SEQ ID NO: 3329 - DNA, 16 bp, Homo sapiens
cttgattgaggtaagg

SEQ ID NO: 3330 - DNA, 14 bp, Homo sapiens
ccattaccttccag

SEQ ID NO: 3331 - DNA, 16 bp, Homo sapiens
gaccaagtgagcagcc

SEQ ID NO: 3332 - DNA, 18 bp, Homo sapiens
gaatatatcttcaccttt

SEQ ID NO: 3333 - DNA, 16 bp, Homo sapiens
gtaggactgctcaatg

SEQ ID NO: 3334 - DNA, 20 bp, Homo sapiens
tcttttccaggttcaagtgg

SEQ ID NO: 3335 - DNA, 16 bp, Homo sapiens
attaatctgggcagtc

SEQ ID NO: 3336 - DNA, 16 bp, Homo sapiens
gaccgcaatagagaca

SEQ ID NO: 3337 - DNA, 16 bp, Homo sapiens
cgacctggccccgcgg

SEQ ID NO: 3338 - DNA, 16 bp, Homo sapiens
catattatgaatcccc

SEQ ID NO: 3339 - DNA, 16 bp, Homo sapiens
tatgaatccccctccc

SEQ ID NO: 3340 - DNA, 20 bp, Homo sapiens
tcctggttccgaggactgca

SEQ ID NO: 3341 - DNA, 16 bp, Homo sapiens
tgtggtacaggtcgat

SEQ ID NO: 3342 - DNA, 20 bp, Homo sapiens
ctgttctagaaacaatattc

SEQ ID NO: 3343 - DNA, 14 bp, Homo sapiens
ctcactgtatggtt

SEQ ID NO: 3344 - DNA, 16 bp, Homo sapiens
aggcacctctggcagc

SEQ ID NO: 3345 - DNA, 16 bp, Homo sapiens
ggcgaaaccagagaga

SEQ ID NO: 3346 - DNA, 16 bp, Homo sapiens
ccaatttgtaggctgt

SEQ ID NO: 3347 - DNA, 18 bp, Homo sapiens
tcgtcttgcctcaggtcc

SEQ ID NO: 3348 - DNA, 16 bp, Homo sapiens
tcccaagcaattttga

SEQ ID NO: 3349 - DNA, 16 bp, Homo sapiens
caccagataggcctgc

SEQ ID NO: 3350 - DNA, 16 bp, Homo sapiens
taccttactggtacac

SEQ ID NO: 3351 - DNA, 16 bp, Homo sapiens
atatagagagctttac

SEQ ID NO: 3352 - DNA, 16 bp, Homo sapiens
cctatttgatcaggag

SEQ ID NO: 3353 - DNA, 15 bp, Homo sapiens
agctctgcagtgtct

SEQ ID NO: 3354 - DNA, 16 bp, Homo sapiens
gggaccaagtgagcag

SEQ ID NO: 3355 - DNA, 16 bp, Homo sapiens
gacaatttgtttaagg

SEQ ID NO: 3356 - DNA, 14 bp, Homo sapiens
ccttacttccccat

SEQ ID NO: 3357 - DNA, 20 bp, Homo sapiens
ttgtactttcttcatttcca

SEQ ID NO: 3358 - DNA, 25 bp, Homo sapiens
cagagctcagatcttctaacttcct

SEQ ID NO: 3359 - DNA, 20 bp, Homo sapiens
gtgcagtattgtagccaggc

SEQ ID NO: 3360 - DNA, 12 bp, Homo sapiens
gggcatatcaaa

SEQ ID NO: 3361 - DNA, 19 bp, Homo sapiens
gaggattaaagtgaggacc

SEQ ID NO: 3362 - DNA, 16 bp, Homo sapiens
ctgtgggtttttgaga

SEQ ID NO: 3363 - DNA, 16 bp, Homo sapiens
ccccataacacttact

SEQ ID NO: 3364 - DNA, 16 bp, Homo sapiens
ttacagaagggccacg

SEQ ID NO: 3365 - DNA, 16 bp, Homo sapiens
caggaaggcggtaggg

SEQ ID NO: 3366 - DNA, 16 bp, Homo sapiens
tcatgcatggcactgt

SEQ ID NO: 3367 - DNA, 16 bp, Homo sapiens
cgcataggtggaacaa

SEQ ID NO: 3368 - DNA, 16 bp, Homo sapiens
agtaaattacggttta

SEQ ID NO: 3369 - DNA, 16 bp, Homo sapiens
taaataactctcacgg

SEQ ID NO: 3370 - DNA, 18 bp, Homo sapiens
ttttccaggttcaagtgg

SEQ ID NO: 3371 - DNA, 16 bp, Homo sapiens
gctttcccaagcaatt

SEQ ID NO: 3372 - DNA, 16 bp, Homo sapiens
aagttcctgcttgaag

SEQ ID NO: 3373 - DNA, 20 bp, Homo sapiens
tccggttctgaaggtgttct

SEQ ID NO: 3374 - DNA, 18 bp, Homo sapiens
gcaggagggaactgaaaa

SEQ ID NO: 3375 - DNA, 16 bp, Homo sapiens
tgcgattgattcgggc

SEQ ID NO: 3376 - DNA, 18 bp, Homo sapiens
caaccctccttcacaata

SEQ ID NO: 3377 - DNA, 16 bp, Homo sapiens
ggctttactccagcca

SEQ ID NO: 3378 - DNA, 16 bp, Homo sapiens
tgcacttccggacagg

SEQ ID NO: 3379 - DNA, 21 bp, Homo sapiens
gattgctgaattatttcttcc

SEQ ID NO: 3380 - DNA, 16 bp, Homo sapiens
agaaaaatggcacggg

SEQ ID NO: 3381 - DNA, 16 bp, Homo sapiens
gacattagtggcttcc

SEQ ID NO: 3382 - DNA, 12 bp, Homo sapiens
gatttcctgatc

SEQ ID NO: 3383 - DNA, 16 bp, Homo sapiens
gcttaagcgagatctt

SEQ ID NO: 3384 - DNA, 16 bp, Homo sapiens
tggacttgttgatgat

SEQ ID NO: 3385 - DNA, 16 bp, Homo sapiens
aaagagaccatctccc

SEQ ID NO: 3386 - DNA, 16 bp, Homo sapiens
cctcatccggttctca

SEQ ID NO: 3387 - DNA, 16 bp, Homo sapiens
agggaaatagacgatc

SEQ ID NO: 3388 - DNA, 14 bp, Homo sapiens
ttgaggaaacagta

SEQ ID NO: 3389 - DNA, 16 bp, Homo sapiens
tcgcacctcgggattc

SEQ ID NO: 3390 - DNA, 18 bp, Homo sapiens
gggaggtgccgccgccgc

SEQ ID NO: 3391 - DNA, 16 bp, Homo sapiens
tgccactggactgact

SEQ ID NO: 3392 - DNA, 16 bp, Homo sapiens
agcagagcataggaga

SEQ ID NO: 3393 - DNA, 16 bp, Homo sapiens
gggataattggagagg

SEQ ID NO: 3394 - DNA, 12 bp, Homo sapiens
aacttcagtgtc

SEQ ID NO: 3395 - DNA, 16 bp, Homo sapiens
tccaactgtgatctct

SEQ ID NO: 3396 - DNA, 16 bp, Homo sapiens
ttcaacaggctgggtc

SEQ ID NO: 3397 - DNA, 18 bp, Homo sapiens
ctgattctgaattctttc

SEQ ID NO: 3398 - DNA, 16 bp, Homo sapiens
ctcaatgtcgatcagc

SEQ ID NO: 3399 - DNA, 16 bp, Homo sapiens
agctactgtagtgatg

SEQ ID NO: 3400 - DNA, 12 bp, Homo sapiens
tggatgattggc

SEQ ID NO: 3401 - DNA, 16 bp, Homo sapiens
gacttgcagtgcaaaa

SEQ ID NO: 3402 - DNA, 20 bp, Homo sapiens
tctcctgagagtgagatcac

SEQ ID NO: 3403 - DNA, 16 bp, Homo sapiens
gaatacagagtgcagg

SEQ ID NO: 3404 - DNA, 16 bp, Homo sapiens
agcaataccttactgg

SEQ ID NO: 3405 - DNA, 16 bp, Homo sapiens
cgggtgacgattcctg

SEQ ID NO: 3406 - DNA, 14 bp, Homo sapiens
aggaggttaaacca

SEQ ID NO: 3407 - DNA, 14 bp, Homo sapiens
tgcccctcttgatg

SEQ ID NO: 3408 - DNA, 19 bp, Homo sapiens
tacaccacaagccaaacga

SEQ ID NO: 3409 - DNA, 18 bp, Homo sapiens
cttggctctggcctgtcc

SEQ ID NO: 3410 - DNA, 20 bp, Homo sapiens
gggtggtaaccaatcagttc

SEQ ID NO: 3411 - DNA, 18 bp, Homo sapiens
tctcctcagcagccagag

SEQ ID NO: 3412 - DNA, 16 bp, Homo sapiens
acaaaacgggagcagg

SEQ ID NO: 3413 - DNA, 20 bp, Homo sapiens
ttctccactgaggacacatt

SEQ ID NO: 3414 - DNA, 20 bp, Homo sapiens
ggccatttctgtgtgtaagc

SEQ ID NO: 3415 - DNA, 16 bp, Homo sapiens
ccacagggttatctgg

SEQ ID NO: 3416 - DNA, 16 bp, Homo sapiens
ccccaggcaatgcata

SEQ ID NO: 3417 - DNA, 19 bp, Homo sapiens
caagtttaatacccatctg

SEQ ID NO: 3418 - DNA, 16 bp, Homo sapiens
taaaagcctggacaag

SEQ ID NO: 3419 - DNA, 16 bp, Homo sapiens
ccaatctgttatgtgg

SEQ ID NO: 3420 - DNA, 16 bp, Homo sapiens
taagtatttgccatcc

SEQ ID NO: 3421 - DNA, 12 bp, Homo sapiens
taaatttggcgg

SEQ ID NO: 3422 - DNA, 16 bp, Homo sapiens
tatgcagctgtcagca

SEQ ID NO: 3423 - DNA, 16 bp, Homo sapiens
tcgagcagggatggct

SEQ ID NO: 3424 - DNA, 16 bp, Homo sapiens
gcattttgatagctcc

SEQ ID NO: 3425 - DNA, 16 bp, Homo sapiens
gaacaagcctcttggc

SEQ ID NO: 3426 - DNA, 16 bp, Homo sapiens
caaactcggctctttg

SEQ ID NO: 3427 - DNA, 16 bp, Homo sapiens
tgtacacctcaggcct

SEQ ID NO: 3428 - DNA, 16 bp, Homo sapiens
tgtgtggttaatatgg

SEQ ID NO: 3429 - DNA, 16 bp, Homo sapiens
taatggtaattctgca

SEQ ID NO: 3430 - DNA, 16 bp, Homo sapiens
atatactggacacggt

SEQ ID NO: 3431 - DNA, 16 bp, Homo sapiens
catcaggctgatgttg

SEQ ID NO: 3432 - DNA, 16 bp, Homo sapiens
gcaaatatgattcatc

SEQ ID NO: 3433 - DNA, 15 bp, Homo sapiens
agcctctggatttga

SEQ ID NO: 3434 - DNA, 16 bp, Homo sapiens
atgtatggatttccag

SEQ ID NO: 3435 - DNA, 16 bp, Homo sapiens
tacaatgtaagccttt

SEQ ID NO: 3436 - DNA, 16 bp, Homo sapiens
cgacttccttggccag

SEQ ID NO: 3437 - DNA, 20 bp, Homo sapiens
aaaaggatgttaatagcgac

SEQ ID NO: 3438 - DNA, 14 bp, Homo sapiens
cctgaagaagtcca

SEQ ID NO: 3439 - DNA, 16 bp, Homo sapiens
tatactggacacggtg

SEQ ID NO: 3440 - DNA, 20 bp, Homo sapiens
gccctgcactgggccgtcgc

SEQ ID NO: 3441 - DNA, 16 bp, Homo sapiens
aggcaaagagtgctag

SEQ ID NO: 3442 - DNA, 16 bp, Homo sapiens
ggaaatagacgatctc

SEQ ID NO: 3443 - DNA, 16 bp, Homo sapiens
ggtaaaatacgaggaa

SEQ ID NO: 3444 - DNA, 16 bp, Homo sapiens
ctgtttggactgtttt

SEQ ID NO: 3445 - DNA, 16 bp, Homo sapiens
acaaatgcggagatga

SEQ ID NO: 3446 - DNA, 16 bp, Homo sapiens
cgccgggtgacgattc

SEQ ID NO: 3447 - DNA, 16 bp, Homo sapiens
ccacatgtatatgggt

SEQ ID NO: 3448 - DNA, 16 bp, Homo sapiens
gctattataacttgta

SEQ ID NO: 3449 - DNA, 16 bp, Homo sapiens
ggagaaggtgttctcc

SEQ ID NO: 3450 - DNA, 16 bp, Homo sapiens
ctaacttgggtggtgg

SEQ ID NO: 3451 - DNA, 16 bp, Homo sapiens
ttggcaaacacgctct

SEQ ID NO: 3452 - DNA, 16 bp, Homo sapiens
gggcactaccttcacc

SEQ ID NO: 3453 - DNA, 20 bp, Homo sapiens
gcactgcggaggtatgggca

SEQ ID NO: 3454 - DNA, 16 bp, Homo sapiens
cttgagggcatggtac

SEQ ID NO: 3455 - DNA, 20 bp, Homo sapiens
gcagcaggtaggactcaaat

SEQ ID NO: 3456 - DNA, 16 bp, Homo sapiens
ttggactgttttcccc

SEQ ID NO: 3457 - DNA, 16 bp, Homo sapiens
agctagatgggaccta

SEQ ID NO: 3458 - DNA, 16 bp, Homo sapiens
ggaaaggtagccactt

SEQ ID NO: 3459 - DNA, 16 bp, Homo sapiens
gctcctcacctggtcc

SEQ ID NO: 3460 - DNA, 16 bp, Homo sapiens
gaattatgccttctac

SEQ ID NO: 3461 - DNA, 16 bp, Homo sapiens
gcagctgtcagcatga

SEQ ID NO: 3462 - DNA, 12 bp, Homo sapiens
ttagccaactgc

SEQ ID NO: 3463 - DNA, 25 bp, Homo sapiens
attcaatgttctgacaacagtttgc

SEQ ID NO: 3464 - DNA, 16 bp, Homo sapiens
cttctccacatcacgg

SEQ ID NO: 3465 - DNA, 16 bp, Homo sapiens
cagcaagtggctgccc

SEQ ID NO: 3466 - DNA, 16 bp, Homo sapiens
aagcaagtgggacccc

SEQ ID NO: 3467 - DNA, 16 bp, Homo sapiens
gcacaattaagtagtt

SEQ ID NO: 3468 - DNA, 16 bp, Homo sapiens
ggcccggtggccatgg

SEQ ID NO: 3469 - DNA, 16 bp, Homo sapiens
tcagtatgtatacttc

SEQ ID NO: 3470 - DNA, 18 bp, Homo sapiens
ctgttgcctccggttctg

SEQ ID NO: 3471 - DNA, 12 bp, Homo sapiens
ctctacaccagg

SEQ ID NO: 3472 - DNA, 16 bp, Homo sapiens
cagcacgggaagcatc

SEQ ID NO: 3473 - DNA, 16 bp, Homo sapiens
cctttgcgcagtgcgg

SEQ ID NO: 3474 - DNA, 25 bp, Homo sapiens
tcattcaactgttgcctccggttct

SEQ ID NO: 3475 - DNA, 16 bp, Homo sapiens
cacggtcgccgcctca

SEQ ID NO: 3476 - DNA, 16 bp, Homo sapiens
tcggaggaacgaggcc

SEQ ID NO: 3477 - DNA, 20 bp, Homo sapiens
tttccacctttgcccaagtc

SEQ ID NO: 3478 - DNA, 16 bp, Homo sapiens
acgattcacatgtggg

SEQ ID NO: 3479 - DNA, 16 bp, Homo sapiens
tggcacacggcaaata

SEQ ID NO: 3480 - DNA, 16 bp, Homo sapiens
aacttaaccagacctc

SEQ ID NO: 3481 - DNA, 14 bp, Homo sapiens
tcagtgtaggaaga

SEQ ID NO: 3482 - DNA, 16 bp, Homo sapiens
ccagtgctgcacggat

SEQ ID NO: 3483 - DNA, 19 bp, Homo sapiens
gccatttctcaacagatct

SEQ ID NO: 3484 - DNA, 16 bp, Homo sapiens
ctgtctcctctcgcaa

SEQ ID NO: 3485 - DNA, 16 bp, Homo sapiens
acgcacattttcctgt

SEQ ID NO: 3486 - DNA, 16 bp, Homo sapiens
tgacgacctgcttttt

SEQ ID NO: 3487 - DNA, 16 bp, Homo sapiens
gaatgccaagtccggg

SEQ ID NO: 3488 - DNA, 16 bp, Homo sapiens
agagaagccccctgca

SEQ ID NO: 3489 - DNA, 16 bp, Homo sapiens
ggagggagcagagcat

SEQ ID NO: 3490 - DNA, 18 bp, Homo sapiens
gcttcttccttagcttcc

SEQ ID NO: 3491 - DNA, 16 bp, Homo sapiens
cactgttggcaaacac

SEQ ID NO: 3492 - DNA, 16 bp, Homo sapiens
cagaccactgaagctc

SEQ ID NO: 3493 - DNA, 16 bp, Homo sapiens
acctagcaagcctacc

SEQ ID NO: 3494 - DNA, 16 bp, Homo sapiens
cgcaggtaaaacaaaa

SEQ ID NO: 3495 - DNA, 20 bp, Homo sapiens
ggtatcatatacgtgaatgt

SEQ ID NO: 3496 - DNA, 20 bp, Homo sapiens
gcccttcagcacgcacacgg

SEQ ID NO: 3497 - DNA, 16 bp, Homo sapiens
gtataccccacaaggc

SEQ ID NO: 3498 - DNA, 16 bp, Homo sapiens
atgtgccggtaggccg

SEQ ID NO: 3499 - DNA, 20 bp, Homo sapiens
tcattgaaacagacatttta

SEQ ID NO: 3500 - DNA, 16 bp, Homo sapiens
cggagggccccagacc

SEQ ID NO: 3501 - DNA, 16 bp, Homo sapiens
aaggatatagggtctc

SEQ ID NO: 3502 - DNA, 16 bp, Homo sapiens
aaagggaaagaagtgc

SEQ ID NO: 3503 - DNA, 20 bp, Homo sapiens
atacagttgatgggccagga

SEQ ID NO: 3504 - DNA, 16 bp, Homo sapiens
gcaaatataaggcatg

SEQ ID NO: 3505 - DNA, 16 bp, Homo sapiens
gggcactaccgagccc

SEQ ID NO: 3506 - DNA, 16 bp, Homo sapiens
ccctttgcgcagtgcg

SEQ ID NO: 3507 - DNA, 20 bp, Homo sapiens
atacaaatcttccaagtgat

SEQ ID NO: 3508 - DNA, 16 bp, Homo sapiens
tgccagactttggagc

SEQ ID NO: 3509 - DNA, 12 bp, Homo sapiens
ccgggtaatggc

SEQ ID NO: 3510 - DNA, 16 bp, Homo sapiens
cgggaggtcgatgagg

SEQ ID NO: 3511 - DNA, 14 bp, Homo sapiens
aaagaggccctcta

SEQ ID NO: 3512 - DNA, 16 bp, Homo sapiens
agctagccagacagca

SEQ ID NO: 3513 - DNA, 16 bp, Homo sapiens
cttcaatcaacagcaa

SEQ ID NO: 3514 - DNA, 16 bp, Homo sapiens
aactctatagatctga

SEQ ID NO: 3515 - DNA, 12 bp, Homo sapiens
gtgacaggcgac

SEQ ID NO: 3516 - DNA, 20 bp, Homo sapiens
gtcccctgggtctccagcca

SEQ ID NO: 3517 - DNA, 16 bp, Homo sapiens
agtaaaagtactcagg

SEQ ID NO: 3518 - DNA, 20 bp, Homo sapiens
ggtaagttctgtccaagccc

SEQ ID NO: 3519 - DNA, 16 bp, Homo sapiens
gtgaactagaggcagg

SEQ ID NO: 3520 - DNA, 16 bp, Homo sapiens
ctgggcactaccgagc

SEQ ID NO: 3521 - DNA, 16 bp, Homo sapiens
gtcgatgagggtcaag

SEQ ID NO: 3522 - DNA, 20 bp, Homo sapiens
catggtgaatcggtccccgc

SEQ ID NO: 3523 - DNA, 16 bp, Homo sapiens
atggccgggaaggact

SEQ ID NO: 3524 - DNA, 16 bp, Homo sapiens
tgtaatagtagcagca

SEQ ID NO: 3525 - DNA, 16 bp, Homo sapiens
gaacagacagttcagg

SEQ ID NO: 3526 - DNA, 20 bp, Homo sapiens
tcctcatggtcacatggatg

SEQ ID NO: 3527 - DNA, 20 bp, Homo sapiens
taaataaaaaggtgcatttt

SEQ ID NO: 3528 - DNA, 18 bp, Homo sapiens
gatagttttcttccctac

SEQ ID NO: 3529 - DNA, 20 bp, Homo sapiens
tattcataaattgagcggcc

SEQ ID NO: 3530 - DNA, 16 bp, Homo sapiens
gcccgggccaacggct

SEQ ID NO: 3531 - DNA, 12 bp, Homo sapiens
aaatcattgtca

SEQ ID NO: 3532 - DNA, 16 bp, Homo sapiens
cgcaatggtgactgcc

SEQ ID NO: 3533 - DNA, 16 bp, Homo sapiens
atgaaattgggataac

SEQ ID NO: 3534 - DNA, 20 bp, Homo sapiens
ttcatatctgaagattcaac

SEQ ID NO: 3535 - DNA, 12 bp, Homo sapiens
ccactcccattc

SEQ ID NO: 3536 - DNA, 18 bp, Homo sapiens
ctcagatcttctaacttc

SEQ ID NO: 3537 - DNA, 16 bp, Homo sapiens
gcccaaaggatctgcc

SEQ ID NO: 3538 - DNA, 16 bp, Homo sapiens
ggtttatttgcacctc

SEQ ID NO: 3539 - DNA, 14 bp, Homo sapiens
cccaggtgtcagag

SEQ ID NO: 3540 - DNA, 20 bp, Homo sapiens
gtctaaccaagtgtccaagg

SEQ ID NO: 3541 - DNA, 16 bp, Homo sapiens
acaaactgagtgttga

SEQ ID NO: 3542 - DNA, 14 bp, Homo sapiens
atgagggtgccgct

SEQ ID NO: 3543 - DNA, 16 bp, Homo sapiens
gccaacgggcatccga

SEQ ID NO: 3544 - DNA, 20 bp, Homo sapiens
ccacaccttcactggtccat

SEQ ID NO: 3545 - DNA, 16 bp, Homo sapiens
caatatctcagcagtg

SEQ ID NO: 3546 - DNA, 18 bp, Homo sapiens
agccaatgaaggtgccat

SEQ ID NO: 3547 - DNA, 14 bp, Homo sapiens
gaatctggaggtaa

SEQ ID NO: 3548 - DNA, 20 bp, Homo sapiens
aagtggacagagagaggctg

SEQ ID NO: 3549 - DNA, 16 bp, Homo sapiens
gtggtttggcaaggac

SEQ ID NO: 3550 - DNA, 16 bp, Homo sapiens
gtggaacttgcctgac

SEQ ID NO: 3551 - DNA, 12 bp, Homo sapiens
ccagcatgagtc

SEQ ID NO: 3552 - DNA, 12 bp, Homo sapiens
aacactgcacat

SEQ ID NO: 3553 - DNA, 20 bp, Homo sapiens
gcgctgctcccaagaactct

SEQ ID NO: 3554 - DNA, 16 bp, Homo sapiens
cgcacttatagaaggc

SEQ ID NO: 3555 - DNA, 14 bp, Homo sapiens
aatcagacttacag

SEQ ID NO: 3556 - DNA, 16 bp, Homo sapiens
ggcttaatcccacacg

SEQ ID NO: 3557 - DNA, 16 bp, Homo sapiens
caccgataaatgttgt

SEQ ID NO: 3558 - DNA, 16 bp, Homo sapiens
ccagaggccacggcca

SEQ ID NO: 3559 - DNA, 16 bp, Homo sapiens
cggaaaaagaagtccc

SEQ ID NO: 3560 - DNA, 16 bp, Homo sapiens
tgcaaccttcaagtaa

SEQ ID NO: 3561 - DNA, 16 bp, Homo sapiens
cgcagatagaaaaact

SEQ ID NO: 3562 - DNA, 16 bp, Homo sapiens
cacaattggtgccttt

SEQ ID NO: 3563 - DNA, 16 bp, Homo sapiens
acaaaatgggttgagg

SEQ ID NO: 3564 - DNA, 18 bp, Homo sapiens
aaaatactaaagttgaat

SEQ ID NO: 3565 - DNA, 16 bp, Homo sapiens
gtctacaaagcccagc

SEQ ID NO: 3566 - DNA, 16 bp, Homo sapiens
gcccggtggccatgga

SEQ ID NO: 3567 - DNA, 16 bp, Homo sapiens
caaattaaatacaccc

SEQ ID NO: 3568 - DNA, 20 bp, Homo sapiens
cgcccttcagcacgcacacg

SEQ ID NO: 3569 - DNA, 16 bp, Homo sapiens
tttaagggcgcggtgg

SEQ ID NO: 3570 - DNA, 16 bp, Homo sapiens
catgatgtcgctggca

SEQ ID NO: 3571 - DNA, 16 bp, Homo sapiens
tcctaagccagatagc

SEQ ID NO: 3572 - DNA, 16 bp, Homo sapiens
catggccacgatggca

SEQ ID NO: 3573 - DNA, 18 bp, Homo sapiens
tttgtcctaagttacgga

SEQ ID NO: 3574 - DNA, 16 bp, Homo sapiens
caacagaggttttttg

SEQ ID NO: 3575 - DNA, 16 bp, Homo sapiens
gtccatccagaccacg

SEQ ID NO: 3576 - DNA, 20 bp, Homo sapiens
gaagggagaaaatcaagtcg

SEQ ID NO: 3577 - DNA, 20 bp, Homo sapiens
agtttgtgcagtattgtagc

SEQ ID NO: 3578 - DNA, 16 bp, Homo sapiens
ctatgagtagcaggct

SEQ ID NO: 3579 - DNA, 16 bp, Homo sapiens
cgccagatctctcttg

SEQ ID NO: 3580 - DNA, 16 bp, Homo sapiens
gaattcgggttgaatc

SEQ ID NO: 3581 - DNA, 16 bp, Homo sapiens
agttattctgatgcca

SEQ ID NO: 3582 - DNA, 16 bp, Homo sapiens
ccagacaccatggtag

SEQ ID NO: 3583 - DNA, 16 bp, Homo sapiens
cgctctgtatcttgat

SEQ ID NO: 3584 - DNA, 16 bp, Homo sapiens
ggacagggtgaattgt

SEQ ID NO: 3585 - DNA, 18 bp, Homo sapiens
ccatttgtatttagcatg

SEQ ID NO: 3586 - DNA, 16 bp, Homo sapiens
actttttggacttgca

SEQ ID NO: 3587 - DNA, 14 bp, Homo sapiens
agcaggttgtgcag

SEQ ID NO: 3588 - DNA, 16 bp, Homo sapiens
ggaggaacgaggcctt

SEQ ID NO: 3589 - DNA, 17 bp, Homo sapiens
ggaggcatactgtattt

SEQ ID NO: 3590 - DNA, 16 bp, Homo sapiens
tgacggaaccgctctg

SEQ ID NO: 3591 - DNA, 16 bp, Homo sapiens
gcaacatgggcactgc

SEQ ID NO: 3592 - DNA, 16 bp, Homo sapiens
tgcattaaaactgcga

SEQ ID NO: 3593 - DNA, 18 bp, Homo sapiens
cttgatggcactgacgta

SEQ ID NO: 3594 - DNA, 16 bp, Homo sapiens
aagcatcggttaaggc

SEQ ID NO: 3595 - DNA, 16 bp, Homo sapiens
ctctaagtgacaactg

SEQ ID NO: 3596 - DNA, 18 bp, Homo sapiens
gctgagggcgacgagaaa

SEQ ID NO: 3597 - DNA, 16 bp, Homo sapiens
agtgcggtgtccagcc

SEQ ID NO: 3598 - DNA, 16 bp, Homo sapiens
agctaagcagctgcac

SEQ ID NO: 3599 - DNA, 16 bp, Homo sapiens
gggaagaggtcactgt

SEQ ID NO: 3600 - DNA, 18 bp, Homo sapiens
cggtcctcggagaacaca

SEQ ID NO: 3601 - DNA, 16 bp, Homo sapiens
tggtcaaactgagcga

SEQ ID NO: 3602 - DNA, 16 bp, Homo sapiens
gcccaagccttacagt

SEQ ID NO: 3603 - DNA, 16 bp, Homo sapiens
agatattgatgtcttg

SEQ ID NO: 3604 - DNA, 16 bp, Homo sapiens
tttgagcccgagaggg

SEQ ID NO: 3605 - DNA, 16 bp, Homo sapiens
atcaagaagggacatt

SEQ ID NO: 3606 - DNA, 16 bp, Homo sapiens
agtgatattcccaaca

SEQ ID NO: 3607 - DNA, 20 bp, Homo sapiens
acagaagatgtttatttgat

SEQ ID NO: 3608 - DNA, 16 bp, Homo sapiens
attttctagactttat

SEQ ID NO: 3609 - DNA, 12 bp, Homo sapiens
cctttagctggc

SEQ ID NO: 3610 - DNA, 18 bp, Homo sapiens
ctgctgggaatcttacag

SEQ ID NO: 3611 - DNA, 16 bp, Homo sapiens
ccttcataccccaact

SEQ ID NO: 3612 - DNA, 16 bp, Homo sapiens
gcctggtccttctcgg

SEQ ID NO: 3613 - DNA, 16 bp, Homo sapiens
acttatcgcctttttt

SEQ ID NO: 3614 - DNA, 16 bp, Homo sapiens
ggtgatgctgcagagc

SEQ ID NO: 3615 - DNA, 17 bp, Homo sapiens
taattttctagacttta

SEQ ID NO: 3616 - DNA, 16 bp, Homo sapiens
ctcgaatgccaagtcc

SEQ ID NO: 3617 - DNA, 16 bp, Homo sapiens
tgcggtgtccagccag

SEQ ID NO: 3618 - DNA, 16 bp, Homo sapiens
agagagaggccgccct

SEQ ID NO: 3619 - DNA, 25 bp, Homo sapiens
ctcttgattgctggtcttgtttttc

SEQ ID NO: 3620 - DNA, 16 bp, Homo sapiens
ggcattggcaaacccg

SEQ ID NO: 3621 - DNA, 20 bp, Homo sapiens
ttaattgatgtagaggacag

SEQ ID NO: 3622 - DNA, 16 bp, Homo sapiens
ttgagaggttgactac

SEQ ID NO: 3623 - DNA, 20 bp, Homo sapiens
aagtgcatcttcatgtgtga

SEQ ID NO: 3624 - DNA, 16 bp, Homo sapiens
tccaaggctgtcagcg

SEQ ID NO: 3625 - DNA, 16 bp, Homo sapiens
ggttaatgcttcacct

SEQ ID NO: 3626 - DNA, 20 bp, Homo sapiens
tcaaatgtgaggtgctgcca

SEQ ID NO: 3627 - DNA, 12 bp, Homo sapiens
gagagatggcag

SEQ ID NO: 3628 - DNA, 25 bp, Homo sapiens
ccagttgcattcaatgttctgacaa

SEQ ID NO: 3629 - DNA, 16 bp, Homo sapiens
gcccctttgcgcagtg

SEQ ID NO: 3630 - DNA, 16 bp, Homo sapiens
attgattagctcctgg

SEQ ID NO: 3631 - DNA, 20 bp, Homo sapiens
actgcctatgatcatgatga

SEQ ID NO: 3632 - DNA, 16 bp, Homo sapiens
cttgaaataccatcca

SEQ ID NO: 3633 - DNA, 16 bp, Homo sapiens
tggaacttttatctgg

SEQ ID NO: 3634 - DNA, 18 bp, Homo sapiens
ccaggtcgaaagggtact

SEQ ID NO: 3635 - DNA, 23 bp, Homo sapiens
gccatttctcaacagatctgtca

SEQ ID NO: 3636 - DNA, 16 bp, Homo sapiens
aatcaatgagtggacg

SEQ ID NO: 3637 - DNA, 16 bp, Homo sapiens
tcaatacacactgttg

SEQ ID NO: 3638 - DNA, 16 bp, Homo sapiens
aacagagcaggcgggc

SEQ ID NO: 3639 - DNA, 16 bp, Homo sapiens
ctgaacatagcactgc

SEQ ID NO: 3640 - DNA, 16 bp, Homo sapiens
tgtcatcgacaggcgg

SEQ ID NO: 3641 - DNA, 20 bp, Homo sapiens
ggacgtgggtcatcaccgtt

SEQ ID NO: 3642 - DNA, 25 bp, Homo sapiens
gatctgtcaaatcgcctgcaggtaa

SEQ ID NO: 3643 - DNA, 16 bp, Homo sapiens
tgtcgatcagcagaag

SEQ ID NO: 3644 - DNA, 12 bp, Homo sapiens
tcgcatccgtct

SEQ ID NO: 3645 - DNA, 14 bp, Homo sapiens
agctgctgtacatc

SEQ ID NO: 3646 - DNA, 16 bp, Homo sapiens
ttgcgcagtgcggtgt

SEQ ID NO: 3647 - DNA, 16 bp, Homo sapiens
tcgaagggaaatagac

SEQ ID NO: 3648 - DNA, 16 bp, Homo sapiens
caggctgatgttgttg

SEQ ID NO: 3649 - DNA, 16 bp, Homo sapiens
gaatttagccctgaca

SEQ ID NO: 3650 - DNA, 16 bp, Homo sapiens
ccccgccgcgggcacg

SEQ ID NO: 3651 - DNA, 16 bp, Homo sapiens
caagaaacgggttgat

SEQ ID NO: 3652 - DNA, 16 bp, Homo sapiens
ggcaagtgtctgagtt

SEQ ID NO: 3653 - DNA, 16 bp, Homo sapiens
gactctctgatgatac

SEQ ID NO: 3654 - DNA, 16 bp, Homo sapiens
gacaaagcacacctgg

SEQ ID NO: 3655 - DNA, 16 bp, Homo sapiens
tgggactaccacccta

SEQ ID NO: 3656 - DNA, 12 bp, Homo sapiens
gaaatggctctg

SEQ ID NO: 3657 - DNA, 16 bp, Homo sapiens
cgtcactggactcccc

SEQ ID NO: 3658 - DNA, 16 bp, Homo sapiens
gctgctctcccggctg

SEQ ID NO: 3659 - DNA, 14 bp, Homo sapiens
ttgttcctgtatac

SEQ ID NO: 3660 - DNA, 16 bp, Homo sapiens
ggaaaccttggactcc

SEQ ID NO: 3661 - DNA, 16 bp, Homo sapiens
ctgagcttctcggcac

SEQ ID NO: 3662 - DNA, 20 bp, Homo sapiens
tggtgacttgtcctttagta

SEQ ID NO: 3663 - DNA, 18 bp, Homo sapiens
gtgtgctcgtcttgcctc

SEQ ID NO: 3664 - DNA, 16 bp, Homo sapiens
ccaaagtgcaacaccc

SEQ ID NO: 3665 - DNA, 16 bp, Homo sapiens
gagatcaacacacttc

SEQ ID NO: 3666 - DNA, 20 bp, Homo sapiens
ccagtctcaccggaagcagt

SEQ ID NO: 3667 - DNA, 16 bp, Homo sapiens
ggccaacactcatctt

SEQ ID NO: 3668 - DNA, 16 bp, Homo sapiens
tttggacttgcagtgc

SEQ ID NO: 3669 - DNA, 19 bp, Homo sapiens
caggatcaccttgccgaaa

SEQ ID NO: 3670 - DNA, 16 bp, Homo sapiens
gtaatgataaggaccc

SEQ ID NO: 3671 - DNA, 16 bp, Homo sapiens
aaccaccgaagctggg

SEQ ID NO: 3672 - DNA, 16 bp, Homo sapiens
cgatatttcaggatct

SEQ ID NO: 3673 - DNA, 16 bp, Homo sapiens
aaactttttggacttg

SEQ ID NO: 3674 - DNA, 16 bp, Homo sapiens
tgtctcctctcgcaac

SEQ ID NO: 3675 - DNA, 20 bp, Homo sapiens
attgggctgaaaggtgtgac

SEQ ID NO: 3676 - DNA, 18 bp, Homo sapiens
tcaaggctttctccagtt

SEQ ID NO: 3677 - DNA, 20 bp, Homo sapiens
cgaatctcctcatggtcgca

SEQ ID NO: 3678 - DNA, 16 bp, Homo sapiens
aagaagagaacgatag

SEQ ID NO: 3679 - DNA, 16 bp, Homo sapiens
tacacctcaggcctgc

SEQ ID NO: 3680 - DNA, 17 bp, Homo sapiens
ttttctattgtctgtcc

SEQ ID NO: 3681 - DNA, 16 bp, Homo sapiens
atgataaaggctggca

SEQ ID NO: 3682 - DNA, 20 bp, Homo sapiens
gcatttctctcatttcctca

SEQ ID NO: 3683 - DNA, 16 bp, Homo sapiens
atgtacacctcaggcc

SEQ ID NO: 3684 - DNA, 16 bp, Homo sapiens
tcatacataaggatgt

SEQ ID NO: 3685 - DNA, 12 bp, Homo sapiens
cctctacaccag

SEQ ID NO: 3686 - DNA, 16 bp, Homo sapiens
tgccatacagggcctc

SEQ ID NO: 3687 - DNA, 12 bp, Homo sapiens
taatccaggtga

SEQ ID NO: 3688 - DNA, 16 bp, Homo sapiens
ctcctctcgcaaccgg

SEQ ID NO: 3689 - DNA, 16 bp, Homo sapiens
acccacagtctgcatt

SEQ ID NO: 3690 - DNA, 16 bp, Homo sapiens
gattgaggtaagggtt

SEQ ID NO: 3691 - DNA, 15 bp, Homo sapiens
attccatcctcaggg

SEQ ID NO: 3692 - DNA, 16 bp, Homo sapiens
gcctttactgacagct

SEQ ID NO: 3693 - DNA, 16 bp, Homo sapiens
ttaagatcaagagatc

SEQ ID NO: 3694 - DNA, 16 bp, Homo sapiens
agaaagaccgcccatg

SEQ ID NO: 3695 - DNA, 14 bp, Homo sapiens
cggcagcagatggc

SEQ ID NO: 3696 - DNA, 16 bp, Homo sapiens
tgcaatttgtctttgc

SEQ ID NO: 3697 - DNA, 20 bp, Homo sapiens
attacatcattatataatgg

SEQ ID NO: 3698 - DNA, 16 bp, Homo sapiens
acctacggcaagcgca

SEQ ID NO: 3699 - DNA, 16 bp, Homo sapiens
tcaggtgcagggaaaa

SEQ ID NO: 3700 - DNA, 16 bp, Homo sapiens
aacaagagaccttgtc

SEQ ID NO: 3701 - DNA, 20 bp, Homo sapiens
tctgattcaactttggtgaa

SEQ ID NO: 3702 - DNA, 16 bp, Homo sapiens
tctaaatcaggacagt

SEQ ID NO: 3703 - DNA, 18 bp, Homo sapiens
ctcaaacacctcccgcac

SEQ ID NO: 3704 - DNA, 16 bp, Homo sapiens
gcacacttttttatga

SEQ ID NO: 3705 - DNA, 16 bp, Homo sapiens
cgcggccggaagcttc

SEQ ID NO: 3706 - DNA, 16 bp, Homo sapiens
aacttactgtctccca

SEQ ID NO: 3707 - DNA, 18 bp, Homo sapiens
ggagggaactgaaaatgg

SEQ ID NO: 3708 - DNA, 16 bp, Homo sapiens
gcgaacctttctcact

SEQ ID NO: 3709 - DNA, 16 bp, Homo sapiens
acgcaaatatctccca

SEQ ID NO: 3710 - DNA, 16 bp, Homo sapiens
gaggttgactacaaag

SEQ ID NO: 3711 - DNA, 16 bp, Homo sapiens
aaatgtatctggttca

SEQ ID NO: 3712 - DNA, 16 bp, Homo sapiens
aacaaaggctgaccgc

SEQ ID NO: 3713 - DNA, 12 bp, Homo sapiens
tggcttcatgtc

SEQ ID NO: 3714 - DNA, 16 bp, Homo sapiens
caaaacgggagcaggc

SEQ ID NO: 3715 - DNA, 16 bp, Homo sapiens
tactagacttataggc

SEQ ID NO: 3716 - DNA, 16 bp, Homo sapiens
caccgcatacagcctt

SEQ ID NO: 3717 - DNA, 16 bp, Homo sapiens
atctatggcatggagc

SEQ ID NO: 3718 - DNA, 16 bp, Homo sapiens
gcggatggtggcattc

SEQ ID NO: 3719 - DNA, 15 bp, Homo sapiens
gtacagcctatttat

SEQ ID NO: 3720 - DNA, 16 bp, Homo sapiens
tgtttggactgttttc

SEQ ID NO: 3721 - DNA, 16 bp, Homo sapiens
cagcagcggcggtgac

SEQ ID NO: 3722 - DNA, 16 bp, Homo sapiens
cttgtaatctgccagt

SEQ ID NO: 3723 - DNA, 16 bp, Homo sapiens
cctcatctatccaagg

SEQ ID NO: 3724 - DNA, 16 bp, Homo sapiens
gtgaatacaccaggat

SEQ ID NO: 3725 - DNA, 20 bp, Homo sapiens
aggtgcatgaactcactgca

SEQ ID NO: 3726 - DNA, 16 bp, Homo sapiens
gcacaaggcaaagagt

SEQ ID NO: 3727 - DNA, 16 bp, Homo sapiens
ctaaaagtaaacttgc

SEQ ID NO: 3728 - DNA, 16 bp, Homo sapiens
agcttctcggcacact

SEQ ID NO: 3729 - DNA, 16 bp, Homo sapiens
cacgaggctgcagacc

SEQ ID NO: 3730 - DNA, 16 bp, Homo sapiens
cactagaggataggcg

SEQ ID NO: 3731 - DNA, 14 bp, Homo sapiens
gcctcagtctgctt

SEQ ID NO: 3732 - DNA, 16 bp, Homo sapiens
tctgtaatggtttccc

SEQ ID NO: 3733 - DNA, 16 bp, Homo sapiens
ccacaaggtagaggga

SEQ ID NO: 3734 - DNA, 12 bp, Homo sapiens
aaagtcaggcca

SEQ ID NO: 3735 - DNA, 16 bp, Homo sapiens
gaacatgcagggcctg

SEQ ID NO: 3736 - DNA, 16 bp, Homo sapiens
aaccaccgcatacagc

SEQ ID NO: 3737 - DNA, 16 bp, Homo sapiens
gacccctcattcagga

SEQ ID NO: 3738 - DNA, 16 bp, Homo sapiens
cgcaagggaaacggcc

SEQ ID NO: 3739 - DNA, 31 bp, Homo sapiens
caagcttttcttttagttgctgctcttttcc

SEQ ID NO: 3740 - DNA, 18 bp, Homo sapiens
agggcagggcataggcgt

SEQ ID NO: 3741 - DNA, 16 bp, Homo sapiens
ggcaattggtactgta

SEQ ID NO: 3742 - DNA, 16 bp, Homo sapiens
taacagagcaggcggg

SEQ ID NO: 3743 - DNA, 18 bp, Homo sapiens
gtcaggtagtacttggca

SEQ ID NO: 3744 - DNA, 16 bp, Homo sapiens
tttttggacttgcagt

SEQ ID NO: 3745 - DNA, 18 bp, Homo sapiens
acctctccaccaacatag

SEQ ID NO: 3746 - DNA, 16 bp, Homo sapiens
actcagagtttacggg

SEQ ID NO: 3747 - DNA, 16 bp, Homo sapiens
cgagaaggaggctgct

SEQ ID NO: 3748 - DNA, 16 bp, Homo sapiens
cggccatgtgccggta

SEQ ID NO: 3749 - DNA, 16 bp, Homo sapiens
ttcgctctgtctcctc

SEQ ID NO: 3750 - DNA, 16 bp, Homo sapiens
tgccagaagagccccg

SEQ ID NO: 3751 - DNA, 14 bp, Homo sapiens
tcagggaaccaggc

SEQ ID NO: 3752 - DNA, 16 bp, Homo sapiens
actatgtacacctcag

SEQ ID NO: 3753 - DNA, 16 bp, Homo sapiens
agatacaagaacaagc

SEQ ID NO: 3754 - DNA, 18 bp, Homo sapiens
ggcagcccctttgacttc

SEQ ID NO: 3755 - DNA, 20 bp, Homo sapiens
ggttctgaaggtgttcttgt

SEQ ID NO: 3756 - DNA, 16 bp, Homo sapiens
tggtatcaggcaagaa

SEQ ID NO: 3757 - DNA, 16 bp, Homo sapiens
tggataaccaggtcga

SEQ ID NO: 3758 - DNA, 16 bp, Homo sapiens
ttcaatggcacagttc

SEQ ID NO: 3759 - DNA, 25 bp, Homo sapiens
tacttcatcccactgattctgaatt

SEQ ID NO: 3760 - DNA, 16 bp, Homo sapiens
acacatttcagacagg

SEQ ID NO: 3761 - DNA, 16 bp, Homo sapiens
cagaagagggatctac

SEQ ID NO: 3762 - DNA, 20 bp, Homo sapiens
ggtcatgttctcggagtcta

SEQ ID NO: 3763 - DNA, 20 bp, Homo sapiens
ggcacgttcacctcacagtc

SEQ ID NO: 3764 - DNA, 16 bp, Homo sapiens
ctagactagacaaaac

SEQ ID NO: 3765 - DNA, 16 bp, Homo sapiens
gcagctctggccgatg

SEQ ID NO: 3766 - DNA, 16 bp, Homo sapiens
aacaatagccattggt

SEQ ID NO: 3767 - DNA, 16 bp, Homo sapiens
tgccagtgaggattgc

SEQ ID NO: 3768 - DNA, 16 bp, Homo sapiens
tccataggttcccgcc

SEQ ID NO: 3769 - DNA, 16 bp, Homo sapiens
cactcatcacgcacag

SEQ ID NO: 3770 - DNA, 16 bp, Homo sapiens
gtggaccggagacagc

SEQ ID NO: 3771 - DNA, 12 bp, Homo sapiens
cctaggttgaat

SEQ ID NO: 3772 - DNA, 16 bp, Homo sapiens
gtacaggagttcccca

SEQ ID NO: 3773 - DNA, 16 bp, Homo sapiens
gcaaatatctcccagt

SEQ ID NO: 3774 - DNA, 20 bp, Homo sapiens
aactgcatgacctggatttt

SEQ ID NO: 3775 - DNA, 20 bp, Homo sapiens
aggatggccttgccataggc

SEQ ID NO: 3776 - DNA, 20 bp, Homo sapiens
tcaaagaggctacttgtatc

SEQ ID NO: 3777 - DNA, 16 bp, Homo sapiens
gccgttgctccccgcc

SEQ ID NO: 3778 - DNA, 16 bp, Homo sapiens
gacgattcgctctgtc

SEQ ID NO: 3779 - DNA, 14 bp, Homo sapiens
cctcttgaacacta

SEQ ID NO: 3780 - DNA, 16 bp, Homo sapiens
tagccgttgctccccg

SEQ ID NO: 3781 - DNA, 20 bp, Homo sapiens
gcaagcatcctgtactgtcc

SEQ ID NO: 3782 - DNA, 16 bp, Homo sapiens
aaatgcaccgctctgc

SEQ ID NO: 3783 - DNA, 16 bp, Homo sapiens
agagattaagtcatcc

SEQ ID NO: 3784 - DNA, 18 bp, Homo sapiens
accgccttccactcagag

SEQ ID NO: 3785 - DNA, 20 bp, Homo sapiens
ggccttgccataggctgagg

SEQ ID NO: 3786 - DNA, 16 bp, Homo sapiens
gaacaagcagagtggt

SEQ ID NO: 3787 - DNA, 16 bp, Homo sapiens
ggtggagtccccgccc

SEQ ID NO: 3788 - DNA, 16 bp, Homo sapiens
tccattaaaatttgcc

SEQ ID NO: 3789 - DNA, 16 bp, Homo sapiens
tggatgaaggccttcg

SEQ ID NO: 3790 - DNA, 18 bp, Homo sapiens
tgaaaccatccaccaaca

SEQ ID NO: 3791 - DNA, 18 bp, Homo sapiens
ggagaacaaactggatga

SEQ ID NO: 3792 - DNA, 16 bp, Homo sapiens
gattataaacctaatc

SEQ ID NO: 3793 - DNA, 25 bp, Homo sapiens
acatcaaggaagatggcatttctag

SEQ ID NO: 3794 - DNA, 16 bp, Homo sapiens
acgcaggtaaaacaaa

SEQ ID NO: 3795 - DNA, 18 bp, Homo sapiens
tggcggtgaagatgttct

SEQ ID NO: 3796 - DNA, 16 bp, Homo sapiens
ggccggcccgggccaa

SEQ ID NO: 3797 - DNA, 16 bp, Homo sapiens
tgagaggccgccgggt

SEQ ID NO: 3798 - DNA, 12 bp, Homo sapiens
ctacaccaggtc

SEQ ID NO: 3799 - DNA, 16 bp, Homo sapiens
actggtacactgccta

SEQ ID NO: 3800 - DNA, 14 bp, Homo sapiens
agggaactcaaagt

SEQ ID NO: 3801 - DNA, 12 bp, Homo sapiens
ttccaatgacta

SEQ ID NO: 3802 - DNA, 16 bp, Homo sapiens
aaacaggcccgcagcc

SEQ ID NO: 3803 - DNA, 20 bp, Homo sapiens
atcatgtcgaatttatggat

SEQ ID NO: 3804 - DNA, 16 bp, Homo sapiens
ctataccatctctcat

SEQ ID NO: 3805 - DNA, 16 bp, Homo sapiens
ggattctaggaggtcg

SEQ ID NO: 3806 - DNA, 20 bp, Homo sapiens
ccatcatctgtgagaaccat

SEQ ID NO: 3807 - DNA, 16 bp, Homo sapiens
cattaagtatttggag

SEQ ID NO: 3808 - DNA, 20 bp, Homo sapiens
ctattgtgaggagggcagtt

SEQ ID NO: 3809 - DNA, 16 bp, Homo sapiens
tgaacttacaagcatc

SEQ ID NO: 3810 - DNA, 18 bp, Homo sapiens
ttctgaaggtgttcttgt

SEQ ID NO: 3811 - DNA, 16 bp, Homo sapiens
acacaaactgagtgtt

SEQ ID NO: 3812 - DNA, 18 bp, Homo sapiens
acgtgctcttcccgctct

SEQ ID NO: 3813 - DNA, 16 bp, Homo sapiens
aggaagatggtcactc

SEQ ID NO: 3814 - DNA, 18 bp, Homo sapiens
gcggctggctgacagagt

SEQ ID NO: 3815 - DNA, 16 bp, Homo sapiens
taagtaattgacaagc

SEQ ID NO: 3816 - DNA, 16 bp, Homo sapiens
ttgtatggtggctcag

SEQ ID NO: 3817 - DNA, 16 bp, Homo sapiens
gccggcagcgactccc

SEQ ID NO: 3818 - DNA, 20 bp, Homo sapiens
gtataacataatccagattc

SEQ ID NO: 3819 - DNA, 16 bp, Homo sapiens
tgctctaaatgactgc

SEQ ID NO: 3820 - DNA, 16 bp, Homo sapiens
atacagatggagtagg

SEQ ID NO: 3821 - DNA, 16 bp, Homo sapiens
cagaagtttggcagat

SEQ ID NO: 3822 - DNA, 19 bp, Homo sapiens
cgtcgcccttcagcacgca

SEQ ID NO: 3823 - DNA, 20 bp, Homo sapiens
ggcaagggcctgagcagaag

SEQ ID NO: 3824 - DNA, 16 bp, Homo sapiens
cccaatagatatctag

SEQ ID NO: 3825 - DNA, 16 bp, Homo sapiens
ccatttaaccatgaca

SEQ ID NO: 3826 - DNA, 16 bp, Homo sapiens
ggtcatgcggagggca

SEQ ID NO: 3827 - DNA, 16 bp, Homo sapiens
ttggtgatacccggga

SEQ ID NO: 3828 - DNA, 16 bp, Homo sapiens
agcattggattgagca

SEQ ID NO: 3829 - DNA, 20 bp, Homo sapiens
ctggtacagcctatttataa

SEQ ID NO: 3830 - DNA, 16 bp, Homo sapiens
ctgcctaactgtattg

SEQ ID NO: 3831 - DNA, 18 bp, Homo sapiens
actggaataaaacgggaa

SEQ ID NO: 3832 - DNA, 16 bp, Homo sapiens
ggtaagtgggaaggcc

SEQ ID NO: 3833 - DNA, 16 bp, Homo sapiens
gataggaactccttgc

SEQ ID NO: 3834 - DNA, 12 bp, Homo sapiens
gatcctgcactg

SEQ ID NO: 3835 - DNA, 16 bp, Homo sapiens
atccatgttcagtttc

SEQ ID NO: 3836 - DNA, 18 bp, Homo sapiens
ctcagcttcttccttagc

SEQ ID NO: 3837 - DNA, 18 bp, Homo sapiens
cggttctgaaggtgttct

SEQ ID NO: 3838 - DNA, 16 bp, Homo sapiens
gaactaactgggctgt

SEQ ID NO: 3839 - DNA, 18 bp, Homo sapiens
tattttcatggtgtttta

SEQ ID NO: 3840 - DNA, 16 bp, Homo sapiens
tcttttcccggccccc

SEQ ID NO: 3841 - DNA, 18 bp, Homo sapiens
tgcctccggttctgaagg

SEQ ID NO: 3842 - DNA, 16 bp, Homo sapiens
cgcattactgagttca

SEQ ID NO: 3843 - DNA, 20 bp, Homo sapiens
atgtaaatggctttacccat

SEQ ID NO: 3844 - DNA, 16 bp, Homo sapiens
cccgggaggtcgatga

SEQ ID NO: 3845 - DNA, 14 bp, Homo sapiens
ccagcaggttgtgc

SEQ ID NO: 3846 - DNA, 16 bp, Homo sapiens
aagtaacccccatcac

SEQ ID NO: 3847 - DNA, 16 bp, Homo sapiens
tccgtataagatgtga

SEQ ID NO: 3848 - DNA, 19 bp, Homo sapiens
aatttggattcttttaata

SEQ ID NO: 3849 - DNA, 16 bp, Homo sapiens
tcaacgacctggcccc

SEQ ID NO: 3850 - DNA, 16 bp, Homo sapiens
gtgtatggacagcagg

SEQ ID NO: 3851 - DNA, 16 bp, Homo sapiens
gaaaaagcacttggac

SEQ ID NO: 3852 - DNA, 16 bp, Homo sapiens
gtccgtaggccttggg

SEQ ID NO: 3853 - DNA, 16 bp, Homo sapiens
cgctttaggacatctt

SEQ ID NO: 3854 - DNA, 16 bp, Homo sapiens
agtactattgcatcat

SEQ ID NO: 3855 - DNA, 16 bp, Homo sapiens
atggacttgttgatga

SEQ ID NO: 3856 - DNA, 16 bp, Homo sapiens
gtcataacatgttact

SEQ ID NO: 3857 - DNA, 16 bp, Homo sapiens
gtatttattcacaggg

SEQ ID NO: 3858 - DNA, 16 bp, Homo sapiens
agggatgtgcccgcac

SEQ ID NO: 3859 - DNA, 16 bp, Homo sapiens
ttcaatctcctgccgg

SEQ ID NO: 3860 - DNA, 16 bp, Homo sapiens
tgggaggacacttcca

SEQ ID NO: 3861 - DNA, 16 bp, Homo sapiens
cagcatgatagggaca

SEQ ID NO: 3862 - DNA, 16 bp, Homo sapiens
atagaaggcctgccct

SEQ ID NO: 3863 - DNA, 16 bp, Homo sapiens
tcacaggccaaggata

SEQ ID NO: 3864 - DNA, 16 bp, Homo sapiens
ggaagttgatataccc

SEQ ID NO: 3865 - DNA, 16 bp, Homo sapiens
tctgtagtttgctacg

SEQ ID NO: 3866 - DNA, 20 bp, Homo sapiens
ggcgatcccaattacaccac

SEQ ID NO: 3867 - DNA, 16 bp, Homo sapiens
gtaaatgctgaatgcc

SEQ ID NO: 3868 - DNA, 16 bp, Homo sapiens
ccaacggctccgggcc

SEQ ID NO: 3869 - DNA, 15 bp, Homo sapiens
agaacaagaaggctc

SEQ ID NO: 3870 - DNA, 16 bp, Homo sapiens
tgcaatgtccagtcct

SEQ ID NO: 3871 - DNA, 16 bp, Homo sapiens
gtgaacactgatcact

SEQ ID NO: 3872 - DNA, 16 bp, Homo sapiens
ccacatctatctcaga

SEQ ID NO: 3873 - DNA, 20 bp, Homo sapiens
tagacacatcggccacacca

SEQ ID NO: 3874 - DNA, 16 bp, Homo sapiens
gacaactcagaactct

SEQ ID NO: 3875 - DNA, 16 bp, Homo sapiens
agagatggaagggacg

SEQ ID NO: 3876 - DNA, 16 bp, Homo sapiens
agcgaggagtgggtga

SEQ ID NO: 3877 - DNA, 16 bp, Homo sapiens
aggatatggacagcag

SEQ ID NO: 3878 - DNA, 16 bp, Homo sapiens
cgcgggcacgcaagcg

SEQ ID NO: 3879 - DNA, 16 bp, Homo sapiens
tcagcatgatagggac

SEQ ID NO: 3880 - DNA, 20 bp, Homo sapiens
accaccagtgtgcggccaat

SEQ ID NO: 3881 - DNA, 20 bp, Homo sapiens
tgctgttcatggccatcagg

SEQ ID NO: 3882 - DNA, 16 bp, Homo sapiens
atttgaggcgaggagg

SEQ ID NO: 3883 - DNA, 16 bp, Homo sapiens
gaaactacggcactct

SEQ ID NO: 3884 - DNA, 16 bp, Homo sapiens
ttaggaggtgacggaa

SEQ ID NO: 3885 - DNA, 16 bp, Homo sapiens
gtaatgagctcagtct

SEQ ID NO: 3886 - DNA, 16 bp, Homo sapiens
gataattggagagggt

SEQ ID NO: 3887 - DNA, 16 bp, Homo sapiens
ttagacatcagactgt

SEQ ID NO: 3888 - DNA, 16 bp, Homo sapiens
gaacatcatggagcct

SEQ ID NO: 3889 - DNA, 16 bp, Homo sapiens
gctaagagcagccctc

SEQ ID NO: 3890 - DNA, 16 bp, Homo sapiens
ggcccgggccaacggc

SEQ ID NO: 3891 - DNA, 16 bp, Homo sapiens
cgcccgggcctcggca

SEQ ID NO: 3892 - DNA, 20 bp, Homo sapiens
atgccatctacatggttttt

SEQ ID NO: 3893 - DNA, 16 bp, Homo sapiens
gcctttcatcaggctg

SEQ ID NO: 3894 - DNA, 16 bp, Homo sapiens
ttaaagcccagcaaca

SEQ ID NO: 3895 - DNA, 16 bp, Homo sapiens
catcatacttatcgcc

SEQ ID NO: 3896 - DNA, 15 bp, Homo sapiens
tcttcttcaccatca

SEQ ID NO: 3897 - DNA, 16 bp, Homo sapiens
aaggaggcttttaagc

SEQ ID NO: 3898 - DNA, 16 bp, Homo sapiens
aagtggtgacgattcg

SEQ ID NO: 3899 - DNA, 16 bp, Homo sapiens
acgcagtgtctcaggt

SEQ ID NO: 3900 - DNA, 16 bp, Homo sapiens
ctcacggtcgccgcct

SEQ ID NO: 3901 - DNA, 16 bp, Homo sapiens
gtgaccaggtgcgggt

SEQ ID NO: 3902 - DNA, 16 bp, Homo sapiens
cgtctgtagccgttgc

SEQ ID NO: 3903 - DNA, 16 bp, Homo sapiens
taacaatccactggcc

SEQ ID NO: 3904 - DNA, 16 bp, Homo sapiens
aagtttattatagggc

SEQ ID NO: 3905 - DNA, 16 bp, Homo sapiens
gtgaaaggttctaggc

SEQ ID NO: 3906 - DNA, 16 bp, Homo sapiens
gataagcccacagagg

SEQ ID NO: 3907 - DNA, 16 bp, Homo sapiens
gaagatgcgattgatt

SEQ ID NO: 3908 - DNA, 16 bp, Homo sapiens
acggaaggtggctgcc

SEQ ID NO: 3909 - DNA, 16 bp, Homo sapiens
attcatgtccatgaca

SEQ ID NO: 3910 - DNA, 16 bp, Homo sapiens
gttcaggaagcaccaa

SEQ ID NO: 3911 - DNA, 16 bp, Homo sapiens
ttgatatacccctgca

SEQ ID NO: 3912 - DNA, 16 bp, Homo sapiens
agccgaagtgtagtgg

SEQ ID NO: 3913 - DNA, 16 bp, Homo sapiens
gcaactatgcatccac

SEQ ID NO: 3914 - DNA, 12 bp, Homo sapiens
taaattgtatgc

SEQ ID NO: 3915 - DNA, 16 bp, Homo sapiens
gggtacaggcaaacct

SEQ ID NO: 3916 - DNA, 15 bp, Homo sapiens
aacatgcctaataat

SEQ ID NO: 3917 - DNA, 16 bp, Homo sapiens
acatctatggcatgga

SEQ ID NO: 3918 - DNA, 16 bp, Homo sapiens
tctaatgtttgctacc

SEQ ID NO: 3919 - DNA, 16 bp, Homo sapiens
acggactggattatgc

SEQ ID NO: 3920 - DNA, 12 bp, Homo sapiens
cacacaggcaat

SEQ ID NO: 3921 - DNA, 16 bp, Homo sapiens
cgcagtgcggtgtcca

SEQ ID NO: 3922 - DNA, 16 bp, Homo sapiens
ggcactaccttcacca

SEQ ID NO: 3923 - DNA, 16 bp, Homo sapiens
cactttaacaagtccc

SEQ ID NO: 3924 - DNA, 16 bp, Homo sapiens
ggcaaccaaggtctga

SEQ ID NO: 3925 - DNA, 15 bp, Homo sapiens
acttgcccctgtggg

SEQ ID NO: 3926 - DNA, 20 bp, Homo sapiens
tgtgtccagttagttcaaac

SEQ ID NO: 3927 - DNA, 15 bp, Homo sapiens
aagggcacagacttc

SEQ ID NO: 3928 - DNA, 16 bp, Homo sapiens
ggaggtcgatgagggt

SEQ ID NO: 3929 - DNA, 16 bp, Homo sapiens
cattaacagagcaggc

SEQ ID NO: 3930 - DNA, 20 bp, Homo sapiens
agccctttgcaagtgcatct

SEQ ID NO: 3931 - DNA, 16 bp, Homo sapiens
gggcaagccacccctc

SEQ ID NO: 3932 - DNA, 16 bp, Homo sapiens
gaataaatttcagccc

SEQ ID NO: 3933 - DNA, 20 bp, Homo sapiens
atgccccaaggctgcatgga

SEQ ID NO: 3934 - DNA, 16 bp, Homo sapiens
gccagtgctgcacgga

SEQ ID NO: 3935 - DNA, 16 bp, Homo sapiens
acgacctggccccgcg

SEQ ID NO: 3936 - DNA, 16 bp, Homo sapiens
aaatatagcagggacc

SEQ ID NO: 3937 - DNA, 16 bp, Homo sapiens
atattatgaatccccc

SEQ ID NO: 3938 - DNA, 20 bp, Homo sapiens
ggagagagcttcctgtagct

SEQ ID NO: 3939 - DNA, 16 bp, Homo sapiens
gcctaccgtgtggcga

SEQ ID NO: 3940 - DNA, 16 bp, Homo sapiens
cttacagtggtcaaac

SEQ ID NO: 3941 - DNA, 16 bp, Homo sapiens
taaattacggtttaca

SEQ ID NO: 3942 - DNA, 16 bp, Homo sapiens
ggtagagtccccccca

SEQ ID NO: 3943 - DNA, 16 bp, Homo sapiens
gcagtggtttggcaag

SEQ ID NO: 3944 - DNA, 16 bp, Homo sapiens
gacctaggtgcctgac

SEQ ID NO: 3945 - DNA, 16 bp, Homo sapiens
caaatgggaaccgctc

SEQ ID NO: 3946 - DNA, 15 bp, Homo sapiens
tggtgccgggtgtct

SEQ ID NO: 3947 - DNA, 16 bp, Homo sapiens
gtcaaactgagcgagg

SEQ ID NO: 3948 - DNA, 16 bp, Homo sapiens
ggtaacacagggcctg

SEQ ID NO: 3949 - DNA, 17 bp, Homo sapiens
ctcagagctcagatctt

SEQ ID NO: 3950 - DNA, 16 bp, Homo sapiens
ggtctattggcacaca

SEQ ID NO: 3951 - DNA, 16 bp, Homo sapiens
gatactatcagtacag

SEQ ID NO: 3952 - DNA, 12 bp, Homo sapiens
gtcagaatatct

SEQ ID NO: 3953 - DNA, 16 bp, Homo sapiens
cgctctgtctcctctc

SEQ ID NO: 3954 - DNA, 16 bp, Homo sapiens
gtctatgtgggctgcc

SEQ ID NO: 3955 - DNA, 16 bp, Homo sapiens
ggctaagcatgaaggg

SEQ ID NO: 3956 - DNA, 16 bp, Homo sapiens
aactggccgagatggg

SEQ ID NO: 3957 - DNA, 16 bp, Homo sapiens
gcaaacacgctctggg

SEQ ID NO: 3958 - DNA, 14 bp, Homo sapiens
tctgttgccacatt

SEQ ID NO: 3959 - DNA, 16 bp, Homo sapiens
aggaagtgccatgttc

SEQ ID NO: 3960 - DNA, 16 bp, Homo sapiens
tcaaatcgggcagaag

SEQ ID NO: 3961 - DNA, 20 bp, Homo sapiens
tccagattccctagagcaga

SEQ ID NO: 3962 - DNA, 16 bp, Homo sapiens
caatctcctgccggac

SEQ ID NO: 3963 - DNA, 16 bp, Homo sapiens
cagaattatcaattcc

SEQ ID NO: 3964 - DNA, 16 bp, Homo sapiens
tcgctaaaggctctga

SEQ ID NO: 3965 - DNA, 16 bp, Homo sapiens
caggaacctactctcg

SEQ ID NO: 3966 - DNA, 16 bp, Homo sapiens
gctcaccggcccacga

SEQ ID NO: 3967 - DNA, 16 bp, Homo sapiens
ctagatgcaatgtcca

SEQ ID NO: 3968 - DNA, 19 bp, Homo sapiens
aggttcaagtgggatacta

SEQ ID NO: 3969 - DNA, 18 bp, Homo sapiens
agccagtcggtaagttct

SEQ ID NO: 3970 - DNA, 20 bp, Homo sapiens
ctatctaaaggaatttcaat

SEQ ID NO: 3971 - DNA, 16 bp, Homo sapiens
ccctatttgatcagga

SEQ ID NO: 3972 - DNA, 16 bp, Homo sapiens
tgaaagaggttcctgc

SEQ ID NO: 3973 - DNA, 16 bp, Homo sapiens
tgtaatcttggcccag

SEQ ID NO: 3974 - DNA, 16 bp, Homo sapiens
gataaggaccccaccc

SEQ ID NO: 3975 - DNA, 16 bp, Homo sapiens
ggctctaaactaataa

SEQ ID NO: 3976 - DNA, 16 bp, Homo sapiens
gcggagggccccagac

SEQ ID NO: 3977 - DNA, 16 bp, Homo sapiens
ggtacatactgcagca

SEQ ID NO: 3978 - DNA, 16 bp, Homo sapiens
tgccatcccagggacc

SEQ ID NO: 3979 - DNA, 16 bp, Homo sapiens
gtgtatataagacccg

SEQ ID NO: 3980 - DNA, 16 bp, Homo sapiens
agccagattattaaca

SEQ ID NO: 3981 - DNA, 16 bp, Homo sapiens
gcccaagtgaactaga

SEQ ID NO: 3982 - DNA, 16 bp, Homo sapiens
atctatccaaggagga

SEQ ID NO: 3983 - DNA, 20 bp, Homo sapiens
ggatgagtgaagtcaaagat

SEQ ID NO: 3984 - DNA, 16 bp, Homo sapiens
atgtcgatcagcagaa

SEQ ID NO: 3985 - DNA, 20 bp, Homo sapiens
ccttggtgcacaagttctgg

SEQ ID NO: 3986 - DNA, 15 bp, Homo sapiens
caagcatatttccat

SEQ ID NO: 3987 - DNA, 16 bp, Homo sapiens
tcgaaggttgatgggc

SEQ ID NO: 3988 - DNA, 16 bp, Homo sapiens
tgacgattcgctctgt

SEQ ID NO: 3989 - DNA, 16 bp, Homo sapiens
actcacattgttgatc

SEQ ID NO: 3990 - DNA, 18 bp, Homo sapiens
tcaatattgttcctgtat

SEQ ID NO: 3991 - DNA, 18 bp, Homo sapiens
ttcaccaaagcatcaaca

SEQ ID NO: 3992 - DNA, 20 bp, Homo sapiens
tcttcatttccacctttgcc

SEQ ID NO: 3993 - DNA, 25 bp, Homo sapiens
ttccaactggggacgcctctgttcc

SEQ ID NO: 3994 - DNA, 12 bp, Homo sapiens
ggattgcaagtt

SEQ ID NO: 3995 - DNA, 19 bp, Homo sapiens
cgccgccatttctcaacag

SEQ ID NO: 3996 - DNA, 20 bp, Homo sapiens
ctgctagcctctggatttga

SEQ ID NO: 3997 - DNA, 16 bp, Homo sapiens
actgaagaggagccca

SEQ ID NO: 3998 - DNA, 18 bp, Homo sapiens
ccagtcagcaccgggttg

SEQ ID NO: 3999 - DNA, 20 bp, Homo sapiens
agataacacgttagggcttc

SEQ ID NO: 4000 - DNA, 20 bp, Homo sapiens
ttgtcagctgtcattgtcgc

SEQ ID NO: 4001 - DNA, 16 bp, Homo sapiens
gtgacgattcctgaac

SEQ ID NO: 4002 - DNA, 18 bp, Homo sapiens
tgtcctcctccgagtagc

SEQ ID NO: 4003 - DNA, 16 bp, Homo sapiens
gaaaatttgtacagga

SEQ ID NO: 4004 - DNA, 20 bp, Homo sapiens
gggtctcagctacatttaca

SEQ ID NO: 4005 - DNA, 16 bp, Homo sapiens
acatactgcagcaggg

SEQ ID NO: 4006 - DNA, 16 bp, Homo sapiens
cggctccgggcctagc

SEQ ID NO: 4007 - DNA, 14 bp, Homo sapiens
ctcttgatgttcag

SEQ ID NO: 4008 - DNA, 25 bp, Homo sapiens
caactgttgcctccggttctgaagg

SEQ ID NO: 4009 - DNA, 16 bp, Homo sapiens
aagaagtgctattata

SEQ ID NO: 4010 - DNA, 16 bp, Homo sapiens
ccgaaagttcttgtac

SEQ ID NO: 4011 - DNA, 16 bp, Homo sapiens
ccaaattcaagagctc

SEQ ID NO: 4012 - DNA, 18 bp, Homo sapiens
tagaggatcttgagcgtc

SEQ ID NO: 4013 - DNA, 16 bp, Homo sapiens
atatagcagggacctg

SEQ ID NO: 4014 - DNA, 16 bp, Homo sapiens
acgggaacaggaatca

SEQ ID NO: 4015 - DNA, 16 bp, Homo sapiens
ttgatttacaggatgc

SEQ ID NO: 4016 - DNA, 16 bp, Homo sapiens
tgctctatcacagggc

SEQ ID NO: 4017 - DNA, 14 bp, Homo sapiens
gttccctttgcagg

SEQ ID NO: 4018 - DNA, 16 bp, Homo sapiens
tgctagggagtagtgg

SEQ ID NO: 4019 - DNA, 14 bp, Homo sapiens
tgaacaccgcggcc

SEQ ID NO: 4020 - DNA, 20 bp, Homo sapiens
tgggccagctcatagaacac

SEQ ID NO: 4021 - DNA, 16 bp, Homo sapiens
tcccacggattatagg

SEQ ID NO: 4022 - DNA, 16 bp, Homo sapiens
ccgtaggcagattcca

SEQ ID NO: 4023 - DNA, 16 bp, Homo sapiens
tgaactagaggcaggc

SEQ ID NO: 4024 - DNA, 16 bp, Homo sapiens
tctaagatccccattt

SEQ ID NO: 4025 - DNA, 16 bp, Homo sapiens
taacacagccatggct

SEQ ID NO: 4026 - DNA, 20 bp, Homo sapiens
cacactgtgtccagttagtt

SEQ ID NO: 4027 - DNA, 16 bp, Homo sapiens
gataattatgtcccat

SEQ ID NO: 4028 - DNA, 16 bp, Homo sapiens
ccacaacgagtaaaca

SEQ ID NO: 4029 - DNA, 25 bp, Homo sapiens
gggatccagtatacttacaggctcc

SEQ ID NO: 4030 - DNA, 18 bp, Homo sapiens
actctcttatagtggtat

SEQ ID NO: 4031 - DNA, 16 bp, Homo sapiens
tcgaaaggaaattctg

SEQ ID NO: 4032 - DNA, 16 bp, Homo sapiens
caatgtcgatcagcag

SEQ ID NO: 4033 - DNA, 16 bp, Homo sapiens
ggctgagttgcttccc

SEQ ID NO: 4034 - DNA, 18 bp, Homo sapiens
gagtgttgttgggctggt

SEQ ID NO: 4035 - DNA, 16 bp, Homo sapiens
aatcacgctgccaagg

SEQ ID NO: 4036 - DNA, 20 bp, Homo sapiens
gtacagcctgctgtattatc

SEQ ID NO: 4037 - DNA, 16 bp, Homo sapiens
ctgccgaggagtatag

SEQ ID NO: 4038 - DNA, 16 bp, Homo sapiens
ttcatgtccatgacac

SEQ ID NO: 4039 - DNA, 16 bp, Homo sapiens
ttcttaacaggctccc

SEQ ID NO: 4040 - DNA, 16 bp, Homo sapiens
aatttgtaggctgtag

SEQ ID NO: 4041 - DNA, 16 bp, Homo sapiens
gatgagggtcttcatg

SEQ ID NO: 4042 - DNA, 16 bp, Homo sapiens
ccaggtcgacacattt

SEQ ID NO: 4043 - DNA, 16 bp, Homo sapiens
gggaaacactcggccg

SEQ ID NO: 4044 - DNA, 20 bp, Homo sapiens
tagagctaaacgatctagaa

SEQ ID NO: 4045 - DNA, 16 bp, Homo sapiens
cggcacggagctgccc

SEQ ID NO: 4046 - DNA, 17 bp, Homo sapiens
tagttcatcccagtgag

SEQ ID NO: 4047 - DNA, 16 bp, Homo sapiens
caacaggtgtcctgct

SEQ ID NO: 4048 - DNA, 16 bp, Homo sapiens
agtacctgattcagcg

SEQ ID NO: 4049 - DNA, 18 bp, Homo sapiens
tcttctgcaggatggaaa

SEQ ID NO: 4050 - DNA, 16 bp, Homo sapiens
gattacaacaacagcc

SEQ ID NO: 4051 - DNA, 16 bp, Homo sapiens
aacaattgtctggtgt

SEQ ID NO: 4052 - DNA, 20 bp, Homo sapiens
agtttaatacccatctgtga

SEQ ID NO: 4053 - DNA, 15 bp, Homo sapiens
actcaccacagatga

SEQ ID NO: 4054 - DNA, 16 bp, Homo sapiens
tcattacggccggcgc

SEQ ID NO: 4055 - DNA, 16 bp, Homo sapiens
tggcataggatcggct

SEQ ID NO: 4056 - DNA, 16 bp, Homo sapiens
acccgacccgagcgac

SEQ ID NO: 4057 - DNA, 16 bp, Homo sapiens
tactgaagtacctggg

SEQ ID NO: 4058 - DNA, 16 bp, Homo sapiens
cggcaaactgcaaagc

SEQ ID NO: 4059 - DNA, 18 bp, Homo sapiens
gctggtactcgcgcctgc

SEQ ID NO: 4060 - DNA, 18 bp, Homo sapiens
gatgctcgaaggtggtca

SEQ ID NO: 4061 - DNA, 20 bp, Homo sapiens
atatggtgatgatgtggcac

SEQ ID NO: 4062 - DNA, 14 bp, Homo sapiens
tcaccagctggatg

SEQ ID NO: 4063 - DNA, 20 bp, Homo sapiens
tgaaggcaggcaggctccca

SEQ ID NO: 4064 - DNA, 15 bp, Homo sapiens
ccttgccttctgctc

SEQ ID NO: 4065 - DNA, 20 bp, Homo sapiens
tccactgaggacacattgaa

SEQ ID NO: 4066 - DNA, 20 bp, Homo sapiens
aaatgtgaggtgctgccacc

SEQ ID NO: 4067 - DNA, 16 bp, Homo sapiens
tcgaactcaacctcag

SEQ ID NO: 4068 - DNA, 14 bp, Homo sapiens
tatgctttgaatcc

SEQ ID NO: 4069 - DNA, 12 bp, Homo sapiens
ataatgatcagg

SEQ ID NO: 4070 - DNA, 16 bp, Homo sapiens
cgtagggccggcagcg

SEQ ID NO: 4071 - DNA, 16 bp, Homo sapiens
aggtcgacacatttca

SEQ ID NO: 4072 - DNA, 19 bp, Homo sapiens
gagatcacagaatcttcaa

SEQ ID NO: 4073 - DNA, 16 bp, Homo sapiens
tcccctcccgttcccg

SEQ ID NO: 4074 - DNA, 18 bp, Homo sapiens
atcttgtcctccagcagg

SEQ ID NO: 4075 - DNA, 18 bp, Homo sapiens
agtgaggaaacgggtggc

SEQ ID NO: 4076 - DNA, 16 bp, Homo sapiens
tctcaacgggagcaac

SEQ ID NO: 4077 - DNA, 12 bp, Homo sapiens
actgatgtaggg

SEQ ID NO: 4078 - DNA, 18 bp, Homo sapiens
gctaggtcaggctgcttt

SEQ ID NO: 4079 - DNA, 16 bp, Homo sapiens
gctcaaatgggaaccg

SEQ ID NO: 4080 - DNA, 18 bp, Homo sapiens
accagattgtactccttc

SEQ ID NO: 4081 - DNA, 14 bp, Homo sapiens
gattgcaagttccg

SEQ ID NO: 4082 - DNA, 16 bp, Homo sapiens
gtgcatcccgagaggg

SEQ ID NO: 4083 - DNA, 16 bp, Homo sapiens
ttgcactggccgggct

SEQ ID NO: 4084 - DNA, 16 bp, Homo sapiens
tcatgattattaacct

SEQ ID NO: 4085 - DNA, 14 bp, Homo sapiens
tgcacaggcaggtt

SEQ ID NO: 4086 - DNA, 18 bp, Homo sapiens
ttggtcacagaggtcaag

SEQ ID NO: 4087 - DNA, 16 bp, Homo sapiens
acacatcagggtttca

SEQ ID NO: 4088 - DNA, 16 bp, Homo sapiens
taaaagcttccaccag

SEQ ID NO: 4089 - DNA, 16 bp, Homo sapiens
atagatgtaagcaact

SEQ ID NO: 4090 - DNA, 16 bp, Homo sapiens
gcccatgggaggagtc

SEQ ID NO: 4091 - DNA, 16 bp, Homo sapiens
tctaatcgaagaagct

SEQ ID NO: 4092 - DNA, 16 bp, Homo sapiens
gacaatggtgatgccc

SEQ ID NO: 4093 - DNA, 14 bp, Homo sapiens
gcaggtccagttca

SEQ ID NO: 4094 - DNA, 16 bp, Homo sapiens
tgccatgcagggcttc

SEQ ID NO: 4095 - DNA, 19 bp, Homo sapiens
aagattacagtgtttaatg

SEQ ID NO: 4096 - DNA, 18 bp, Homo sapiens
gccgtgaactcctcatca

SEQ ID NO: 4097 - DNA, 16 bp, Homo sapiens
caccagggactcatta

SEQ ID NO: 4098 - DNA, 14 bp, Homo sapiens
cagaaggtgtacat

SEQ ID NO: 4099 - DNA, 16 bp, Homo sapiens
gctcgatctgccgcag

SEQ ID NO: 4100 - DNA, 16 bp, Homo sapiens
cagtggtcaaactgag

SEQ ID NO: 4101 - DNA, 20 bp, Homo sapiens
gtcagctgtcattgtcgctg

SEQ ID NO: 4102 - DNA, 16 bp, Homo sapiens
gacaattgtgaccggc

SEQ ID NO: 4103 - DNA, 16 bp, Homo sapiens
ggtgacgattcctgaa

SEQ ID NO: 4104 - DNA, 16 bp, Homo sapiens
ggcttcaactatccca

SEQ ID NO: 4105 - DNA, 12 bp, Homo sapiens
taaatataggtc

SEQ ID NO: 4106 - DNA, 16 bp, Homo sapiens
gcggagacagaaggct

SEQ ID NO: 4107 - DNA, 16 bp, Homo sapiens
ttgaattccgcatcat

SEQ ID NO: 4108 - DNA, 16 bp, Homo sapiens
ccgataatgacctaaa

SEQ ID NO: 4109 - DNA, 21 bp, Homo sapiens
caagatcttcacaaaagggtt

SEQ ID NO: 4110 - DNA, 16 bp, Homo sapiens
ttccagaagacctgtt

SEQ ID NO: 4111 - DNA, 16 bp, Homo sapiens
gctgcgcaagggaaac

SEQ ID NO: 4112 - DNA, 14 bp, Homo sapiens
tgctgcaacatgat

SEQ ID NO: 4113 - DNA, 14 bp, Homo sapiens
ttgtggtgccaagg

SEQ ID NO: 4114 - DNA, 16 bp, Homo sapiens
gctgcgcaggacggct

SEQ ID NO: 4115 - DNA, 16 bp, Homo sapiens
acacaacaagtcagcc

SEQ ID NO: 4116 - DNA, 16 bp, Homo sapiens
gtctatggccccgggc

SEQ ID NO: 4117 - DNA, 17 bp, Homo sapiens
gttcatcccagtgagaa

SEQ ID NO: 4118 - DNA, 25 bp, Homo sapiens
ccggttctgaaggtgttcttgtact

SEQ ID NO: 4119 - DNA, 16 bp, Homo sapiens
tgctagaggagcggca

SEQ ID NO: 4120 - DNA, 18 bp, Homo sapiens
gatggtgtccttcacggc

SEQ ID NO: 4121 - DNA, 14 bp, Homo sapiens
atcagccagacaga

SEQ ID NO: 4122 - DNA, 18 bp, Homo sapiens
cgcttggctctggaccgc

SEQ ID NO: 4123 - DNA, 16 bp, Homo sapiens
tcttaacaggctccct

SEQ ID NO: 4124 - DNA, 16 bp, Homo sapiens
gtgcaacaccccagcg

SEQ ID NO: 4125 - DNA, 20 bp, Homo sapiens
tgtcccctaatggcttccac

SEQ ID NO: 4126 - DNA, 16 bp, Homo sapiens
ccaattacttgtttgc

SEQ ID NO: 4127 - DNA, 16 bp, Homo sapiens
agcaattggccaaatc

SEQ ID NO: 4128 - DNA, 16 bp, Homo sapiens
gctataaaaccagcca

SEQ ID NO: 4129 - DNA, 16 bp, Homo sapiens
aactgagcttctcggc

SEQ ID NO: 4130 - DNA, 16 bp, Homo sapiens
caggactagttcacta

SEQ ID NO: 4131 - DNA, 16 bp, Homo sapiens
atgataacacagcctc

SEQ ID NO: 4132 - DNA, 16 bp, Homo sapiens
ggtgtcaagggttctg

SEQ ID NO: 4133 - DNA, 16 bp, Homo sapiens
atgcaatgtccagtcc

SEQ ID NO: 4134 - DNA, 16 bp, Homo sapiens
taacaacaattgtctg

SEQ ID NO: 4135 - DNA, 16 bp, Homo sapiens
cgttattgtcatttgt

SEQ ID NO: 4136 - DNA, 16 bp, Homo sapiens
gaagaccttggtagag

SEQ ID NO: 4137 - DNA, 12 bp, Homo sapiens
ctggcatgacca

SEQ ID NO: 4138 - DNA, 16 bp, Homo sapiens
tcacggatcttgaggt

SEQ ID NO: 4139 - DNA, 14 bp, Homo sapiens
gcagggtgccttgg

SEQ ID NO: 4140 - DNA, 16 bp, Homo sapiens
tgatagtcggttgtct

SEQ ID NO: 4141 - DNA, 16 bp, Homo sapiens
aactgagcgaggagtg

SEQ ID NO: 4142 - DNA, 16 bp, Homo sapiens
taaactaatgacagac

SEQ ID NO: 4143 - DNA, 16 bp, Homo sapiens
gagcataggaagaggg

SEQ ID NO: 4144 - DNA, 16 bp, Homo sapiens
atttatgcgattggcc

SEQ ID NO: 4145 - DNA, 15 bp, Homo sapiens
ctggaaacttgcccc

SEQ ID NO: 4146 - DNA, 16 bp, Homo sapiens
acaaaagtacagggtg

SEQ ID NO: 4147 - DNA, 16 bp, Homo sapiens
tcacacacggattttt

SEQ ID NO: 4148 - DNA, 20 bp, Homo sapiens
aaagatgctgttcatggcca

SEQ ID NO: 4149 - DNA, 16 bp, Homo sapiens
ccttttctaatcgaag

SEQ ID NO: 4150 - DNA, 15 bp, Homo sapiens
tccggttctgaaggt

SEQ ID NO: 4151 - DNA, 16 bp, Homo sapiens
ccacactaagcatgta

SEQ ID NO: 4152 - DNA, 16 bp, Homo sapiens
cattaaaatgggtctg

SEQ ID NO: 4153 - DNA, 20 bp, Homo sapiens
aactgagttttataaaacta

SEQ ID NO: 4154 - DNA, 16 bp, Homo sapiens
gaggaggcggtgtcct

SEQ ID NO: 4155 - DNA, 19 bp, Homo sapiens
acatttctacagctagcag

SEQ ID NO: 4156 - DNA, 16 bp, Homo sapiens
agccactaagtggccc

SEQ ID NO: 4157 - DNA, 12 bp, Homo sapiens
tctgcagttaaa

SEQ ID NO: 4158 - DNA, 16 bp, Homo sapiens
gagaatatcacagggt

SEQ ID NO: 4159 - DNA, 20 bp, Homo sapiens
ttccacagaagatgtttatt

SEQ ID NO: 4160 - DNA, 16 bp, Homo sapiens
ctacagagcattcccc

SEQ ID NO: 4161 - DNA, 16 bp, Homo sapiens
gaacagggaatattag

SEQ ID NO: 4162 - DNA, 16 bp, Homo sapiens
gcttaaggagatccga

SEQ ID NO: 4163 - DNA, 16 bp, Homo sapiens
ttatctaacagtccca

SEQ ID NO: 4164 - DNA, 16 bp, Homo sapiens
aggatggtgtcaaggg

SEQ ID NO: 4165 - DNA, 16 bp, Homo sapiens
ccaaagttctatctgc

SEQ ID NO: 4166 - DNA, 16 bp, Homo sapiens
gtcttctgggtaaatg

SEQ ID NO: 4167 - DNA, 16 bp, Homo sapiens
acacttcaaactcggc

SEQ ID NO: 4168 - DNA, 16 bp, Homo sapiens
gctccgggcctagcaa

SEQ ID NO: 4169 - DNA, 16 bp, Homo sapiens
cagaatatttaactcg

SEQ ID NO: 4170 - DNA, 16 bp, Homo sapiens
acagaataagacatcg

SEQ ID NO: 4171 - DNA, 20 bp, Homo sapiens
actttcttcatttccacctt

SEQ ID NO: 4172 - DNA, 16 bp, Homo sapiens
gtctttccggtctttt

SEQ ID NO: 4173 - DNA, 16 bp, Homo sapiens
ttaatatggccgggaa

SEQ ID NO: 4174 - DNA, 20 bp, Homo sapiens
aatgcttctaaaattactca

SEQ ID NO: 4175 - DNA, 16 bp, Homo sapiens
actatattcaacaggc

SEQ ID NO: 4176 - DNA, 15 bp, Homo sapiens
tactttcctttaaga

SEQ ID NO: 4177 - DNA, 16 bp, Homo sapiens
agctacagcaatatag

SEQ ID NO: 4178 - DNA, 20 bp, Homo sapiens
aatcagtttctcactacagg

SEQ ID NO: 4179 - DNA, 18 bp, Homo sapiens
gtagatgatcttgtcgct

SEQ ID NO: 4180 - DNA, 20 bp, Homo sapiens
ctcataataagtgccataca

SEQ ID NO: 4181 - DNA, 16 bp, Homo sapiens
catcatattggtggga

SEQ ID NO: 4182 - DNA, 16 bp, Homo sapiens
gtgggtttttgagagg

SEQ ID NO: 4183 - DNA, 14 bp, Homo sapiens
cagtcacaaaggca

SEQ ID NO: 4184 - DNA, 16 bp, Homo sapiens
aggactatgtacacct

SEQ ID NO: 4185 - DNA, 16 bp, Homo sapiens
gcacttatagaaggcc

SEQ ID NO: 4186 - DNA, 16 bp, Homo sapiens
tggtgcaccgcagaca

SEQ ID NO: 4187 - DNA, 16 bp, Homo sapiens
acccatcagggaggca

SEQ ID NO: 4188 - DNA, 16 bp, Homo sapiens
acactgcctaactgta

SEQ ID NO: 4189 - DNA, 22 bp, Homo sapiens
ccggttctgaaggtgttcttgt

SEQ ID NO: 4190 - DNA, 16 bp, Homo sapiens
ttttatgaccgtggcc

SEQ ID NO: 4191 - DNA, 16 bp, Homo sapiens
tcttacctcggtcttc

SEQ ID NO: 4192 - DNA, 16 bp, Homo sapiens
aaccaggcccgcggcg

SEQ ID NO: 4193 - DNA, 18 bp, Homo sapiens
cataatacacaataacaa

SEQ ID NO: 4194 - DNA, 16 bp, Homo sapiens
cgcggatggacttgtt

SEQ ID NO: 4195 - DNA, 17 bp, Homo sapiens
attttctagactttatg

SEQ ID NO: 4196 - DNA, 16 bp, Homo sapiens
cagaagatggctggac

SEQ ID NO: 4197 - DNA, 20 bp, Homo sapiens
tcatttccacctttgcccaa

SEQ ID NO: 4198 - DNA, 16 bp, Homo sapiens
gagcacctgagtcagt

SEQ ID NO: 4199 - DNA, 16 bp, Homo sapiens
gattaaggtgatgctg

SEQ ID NO: 4200 - DNA, 14 bp, Homo sapiens
gctggaattctggt

SEQ ID NO: 4201 - DNA, 14 bp, Homo sapiens
tgacacccagaagc

SEQ ID NO: 4202 - DNA, 16 bp, Homo sapiens
gacaatgggtcaacgc

SEQ ID NO: 4203 - DNA, 16 bp, Homo sapiens
agatgatgtgtttcct

SEQ ID NO: 4204 - DNA, 16 bp, Homo sapiens
gtaggatagggagcgg

SEQ ID NO: 4205 - DNA, 16 bp, Homo sapiens
ggacgaaagtgaggag

SEQ ID NO: 4206 - DNA, 15 bp, Homo sapiens
ctagcctctggattt

SEQ ID NO: 4207 - DNA, 16 bp, Homo sapiens
acgaaggcggcaagtg

SEQ ID NO: 4208 - DNA, 24 bp, Homo sapiens
tgttcagcttctgttagccactga

SEQ ID NO: 4209 - DNA, 20 bp, Homo sapiens
gacgcaaaccagcaccccgt

SEQ ID NO: 4210 - DNA, 16 bp, Homo sapiens
gacgattcctgaaccg

SEQ ID NO: 4211 - DNA, 16 bp, Homo sapiens
gttaattgtgcacttg

SEQ ID NO: 4212 - DNA, 16 bp, Homo sapiens
gcatacagcctttttt

SEQ ID NO: 4213 - DNA, 16 bp, Homo sapiens
tatcacccagcaggca

SEQ ID NO: 4214 - DNA, 16 bp, Homo sapiens
gcagaagaatctggtc

SEQ ID NO: 4215 - DNA, 20 bp, Homo sapiens
tcaacccagacatatccacc

SEQ ID NO: 4216 - DNA, 18 bp, Homo sapiens
ggtcaacgtcggtcaggt

SEQ ID NO: 4217 - DNA, 16 bp, Homo sapiens
gctcggcctcacggtc

SEQ ID NO: 4218 - DNA, 19 bp, Homo sapiens
gcactggtacagcctgctg

SEQ ID NO: 4219 - DNA, 16 bp, Homo sapiens
tgctagaaaacagcga

SEQ ID NO: 4220 - DNA, 16 bp, Homo sapiens
tcaaatggtgaccact

SEQ ID NO: 4221 - DNA, 16 bp, Homo sapiens
taccagcggcaccacc

SEQ ID NO: 4222 - DNA, 16 bp, Homo sapiens
acagatgatgtgtttc

SEQ ID NO: 4223 - DNA, 16 bp, Homo sapiens
ggcctagtcgagcagg

SEQ ID NO: 4224 - DNA, 16 bp, Homo sapiens
gtatgctggacaccgg

SEQ ID NO: 4225 - DNA, 16 bp, Homo sapiens
ttaactatatctaact

SEQ ID NO: 4226 - DNA, 20 bp, Homo sapiens
gaaattgatgatgccctgca

SEQ ID NO: 4227 - DNA, 20 bp, Homo sapiens
tcctttagtaaacatatcat

SEQ ID NO: 4228 - DNA, 12 bp, Homo sapiens
ttgttgttccct

SEQ ID NO: 4229 - DNA, 16 bp, Homo sapiens
acagataaatcaagcc

SEQ ID NO: 4230 - DNA, 16 bp, Homo sapiens
acaattggtgcctttc

SEQ ID NO: 4231 - DNA, 16 bp, Homo sapiens
aatcaaaactgggcgc

SEQ ID NO: 4232 - DNA, 16 bp, Homo sapiens
ctctatagatctgagt

SEQ ID NO: 4233 - DNA, 16 bp, Homo sapiens
ccatatgtgtggctct

SEQ ID NO: 4234 - DNA, 16 bp, Homo sapiens
caagagggccccctac

SEQ ID NO: 4235 - DNA, 16 bp, Homo sapiens
ggatatggacagcagg

SEQ ID NO: 4236 - DNA, 25 bp, Homo sapiens
gttgcctccggttctgaaggtgttc

SEQ ID NO: 4237 - DNA, 16 bp, Homo sapiens
gtaagggttactttgc

SEQ ID NO: 4238 - DNA, 16 bp, Homo sapiens
tggtcccagcataggg

SEQ ID NO: 4239 - DNA, 16 bp, Homo sapiens
aggcagggccgctgtc

SEQ ID NO: 4240 - DNA, 16 bp, Homo sapiens
cgttgctccccgcccg

SEQ ID NO: 4241 - DNA, 16 bp, Homo sapiens
ccggacccgttcttga

SEQ ID NO: 4242 - DNA, 16 bp, Homo sapiens
tccttgatctggtact

SEQ ID NO: 4243 - DNA, 16 bp, Homo sapiens
gtcttagacatcagac

SEQ ID NO: 4244 - DNA, 16 bp, Homo sapiens
ctgagcttactggtac

SEQ ID NO: 4245 - DNA, 12 bp, Homo sapiens
tagcctctggat

SEQ ID NO: 4246 - DNA, 16 bp, Homo sapiens
tcactttacagcctcc

SEQ ID NO: 4247 - DNA, 20 bp, Homo sapiens
ctcactacaggtactttaaa

SEQ ID NO: 4248 - DNA, 16 bp, Homo sapiens
acaataccttaatcac

SEQ ID NO: 4249 - DNA, 16 bp, Homo sapiens
gcctcgaatgccaagt

SEQ ID NO: 4250 - DNA, 21 bp, Homo sapiens
actggggacgcctctgttcca

SEQ ID NO: 4251 - DNA, 16 bp, Homo sapiens
ctggaccgcatcagag

SEQ ID NO: 4252 - DNA, 16 bp, Homo sapiens
tgtattacccagtggc

SEQ ID NO: 4253 - DNA, 16 bp, Homo sapiens
ttaatcacttagccac

SEQ ID NO: 4254 - DNA, 16 bp, Homo sapiens
ccttggtgatacccgg

SEQ ID NO: 4255 - DNA, 16 bp, Homo sapiens
agtgtccacctgatct

SEQ ID NO: 4256 - DNA, 16 bp, Homo sapiens
ctctaatgtttgctac

SEQ ID NO: 4257 - DNA, 20 bp, Homo sapiens
gttcacctcacagtcatatc

SEQ ID NO: 4258 - DNA, 16 bp, Homo sapiens
tgtcatcctaactgct

SEQ ID NO: 4259 - DNA, 16 bp, Homo sapiens
ccctatgggttctggc

SEQ ID NO: 4260 - DNA, 16 bp, Homo sapiens
gacacccgacccgagc

SEQ ID NO: 4261 - DNA, 15 bp, Homo sapiens
agacttaccttgtgt

SEQ ID NO: 4262 - DNA, 16 bp, Homo sapiens
tcgcaagccaaatagg

SEQ ID NO: 4263 - DNA, 16 bp, Homo sapiens
agaacgataggccagg

SEQ ID NO: 4264 - DNA, 16 bp, Homo sapiens
ggcaaccacacatcca

SEQ ID NO: 4265 - DNA, 18 bp, Homo sapiens
actgacgtactgatgctc

SEQ ID NO: 4266 - DNA, 15 bp, Homo sapiens
actggattccaatca

SEQ ID NO: 4267 - DNA, 16 bp, Homo sapiens
tgttatgggccctcct

SEQ ID NO: 4268 - DNA, 16 bp, Homo sapiens
ttctcccctcccgttc

SEQ ID NO: 4269 - DNA, 16 bp, Homo sapiens
agtgaaattcactcca

SEQ ID NO: 4270 - DNA, 16 bp, Homo sapiens
cacttagccacatctg

SEQ ID NO: 4271 - DNA, 17 bp, Homo sapiens
tcacccaccatcaccct

SEQ ID NO: 4272 - DNA, 16 bp, Homo sapiens
tgagcagccacaggta

SEQ ID NO: 4273 - DNA, 16 bp, Homo sapiens
acaacaatttgctacg

SEQ ID NO: 4274 - DNA, 16 bp, Homo sapiens
tgacctgtggcaattc

SEQ ID NO: 4275 - DNA, 16 bp, Homo sapiens
atccaaaatcctcccc

SEQ ID NO: 4276 - DNA, 18 bp, Homo sapiens
aattatttcctttctgag

SEQ ID NO: 4277 - DNA, 16 bp, Homo sapiens
tcgcagatagaaaaac

SEQ ID NO: 4278 - DNA, 16 bp, Homo sapiens
cctaactgtattgatt

SEQ ID NO: 4279 - DNA, 20 bp, Homo sapiens
ttgcggaagcagtaattggt

SEQ ID NO: 4280 - DNA, 20 bp, Homo sapiens
aaaccctccaaggctttcag

SEQ ID NO: 4281 - DNA, 18 bp, Homo sapiens
ttcccaattctcaggaat

SEQ ID NO: 4282 - DNA, 12 bp, Homo sapiens
cagccctcctgt

SEQ ID NO: 4283 - DNA, 16 bp, Homo sapiens
caaagtagttcctcca

SEQ ID NO: 4284 - DNA, 15 bp, Homo sapiens
tgctagcctctggat

SEQ ID NO: 4285 - DNA, 16 bp, Homo sapiens
gaatcaagtacatttc

SEQ ID NO: 4286 - DNA, 16 bp, Homo sapiens
ccacatagcccaagcc

SEQ ID NO: 4287 - DNA, 16 bp, Homo sapiens
gaacaatcatagcctc

SEQ ID NO: 4288 - DNA, 16 bp, Homo sapiens
aaccgctgggatcccc

SEQ ID NO: 4289 - DNA, 16 bp, Homo sapiens
ggacttgttgatgatg

SEQ ID NO: 4290 - DNA, 14 bp, Homo sapiens
ctggacttggcggt

SEQ ID NO: 4291 - DNA, 16 bp, Homo sapiens
ggccctgcagctctgc

SEQ ID NO: 4292 - DNA, 20 bp, Homo sapiens
agatctgtcccctaatggct

SEQ ID NO: 4293 - DNA, 20 bp, Homo sapiens
ggtttttattcacaggcttg

SEQ ID NO: 4294 - DNA, 16 bp, Homo sapiens
tcccagacaggagaac

SEQ ID NO: 4295 - DNA, 25 bp, Homo sapiens
actgttgcctccggttctgaaggtg

SEQ ID NO: 4296 - DNA, 16 bp, Homo sapiens
cagatgatgtgtttcc

SEQ ID NO: 4297 - DNA, 20 bp, Homo sapiens
catcttgttacctctcttca

SEQ ID NO: 4298 - DNA, 18 bp, Homo sapiens
cgaaaaggtcaagtgcta

SEQ ID NO: 4299 - DNA, 16 bp, Homo sapiens
ctaaatgacaagggtc

SEQ ID NO: 4300 - DNA, 16 bp, Homo sapiens
gtgtagcatgcgccac

SEQ ID NO: 4301 - DNA, 20 bp, Homo sapiens
ttgcctccggttctgaaggt

SEQ ID NO: 4302 - DNA, 18 bp, Homo sapiens
cagcctgccatccagaga

SEQ ID NO: 4303 - DNA, 20 bp, Homo sapiens
ctacttcgaagtggctttgg

SEQ ID NO: 4304 - DNA, 18 bp, Homo sapiens
taacagtctgagtaggag

SEQ ID NO: 4305 - DNA, 16 bp, Homo sapiens
ccaattatgaacacta

SEQ ID NO: 4306 - DNA, 16 bp, Homo sapiens
gaggagtataggtagg

SEQ ID NO: 4307 - DNA, 12 bp, Homo sapiens
caatctgacaca

SEQ ID NO: 4308 - DNA, 20 bp, Homo sapiens
gctcagttaacttgatccaa

SEQ ID NO: 4309 - DNA, 16 bp, Homo sapiens
gatgagggtcaagttc

SEQ ID NO: 4310 - DNA, 16 bp, Homo sapiens
cgctcaagggaaaaat

SEQ ID NO: 4311 - DNA, 16 bp, Homo sapiens
aggaaagttattgatg

SEQ ID NO: 4312 - DNA, 16 bp, Homo sapiens
ctgcacggatgtcctt

SEQ ID NO: 4313 - DNA, 18 bp, Homo sapiens
gtcactgaggcattccgc

SEQ ID NO: 4314 - DNA, 16 bp, Homo sapiens
ccatttcaggagacct

SEQ ID NO: 4315 - DNA, 16 bp, Homo sapiens
tacaaaatgggttgag

SEQ ID NO: 4316 - DNA, 16 bp, Homo sapiens
ctcatcaccgtacaca

SEQ ID NO: 4317 - DNA, 12 bp, Homo sapiens
cagggtgactgc

SEQ ID NO: 4318 - DNA, 18 bp, Homo sapiens
tggatatggtgaaataaa

SEQ ID NO: 4319 - DNA, 16 bp, Homo sapiens
tgtgatgggcatcccc

SEQ ID NO: 4320 - DNA, 16 bp, Homo sapiens
gtgaagtgcagtagct

SEQ ID NO: 4321 - DNA, 16 bp, Homo sapiens
aaggactatgtacacc

SEQ ID NO: 4322 - DNA, 15 bp, Homo sapiens
aattttctagacttt

SEQ ID NO: 4323 - DNA, 16 bp, Homo sapiens
aaccatttccctctgg

SEQ ID NO: 4324 - DNA, 16 bp, Homo sapiens
acaatcatatcaccac

SEQ ID NO: 4325 - DNA, 20 bp, Homo sapiens
catctccaagtctaaatctg

SEQ ID NO: 4326 - DNA, 30 bp, Homo sapiens
ctcttttccaggttcaagtgggatactagc

SEQ ID NO: 4327 - DNA, 16 bp, Homo sapiens
gtacaatgtaagcctt

SEQ ID NO: 4328 - DNA, 16 bp, Homo sapiens
tcctggataaccaggt

SEQ ID NO: 4329 - DNA, 16 bp, Homo sapiens
catgtccatgacacct

SEQ ID NO: 4330 - DNA, 16 bp, Homo sapiens
ccagacattgctgtcg

SEQ ID NO: 4331 - DNA, 16 bp, Homo sapiens
ccgagaaggaggctgc

SEQ ID NO: 4332 - DNA, 16 bp, Homo sapiens
gcacatgtggcacacg

SEQ ID NO: 4333 - DNA, 25 bp, Homo sapiens
tcaaggaagatggcatttctagttt

SEQ ID NO: 4334 - DNA, 16 bp, Homo sapiens
aatgggaagttgatat

SEQ ID NO: 4335 - DNA, 16 bp, Homo sapiens
cttaatagtagtatac

SEQ ID NO: 4336 - DNA, 20 bp, Homo sapiens
atacagggtttttattcaca

SEQ ID NO: 4337 - DNA, 16 bp, Homo sapiens
tatagggcttcttatc

SEQ ID NO: 4338 - DNA, 16 bp, Homo sapiens
ggcaaggccggcccgg

SEQ ID NO: 4339 - DNA, 16 bp, Homo sapiens
gccaatggaaggcacc

SEQ ID NO: 4340 - DNA, 16 bp, Homo sapiens
cccaactgtgctttcc

SEQ ID NO: 4341 - DNA, 14 bp, Homo sapiens
gagtagaggcaggc

SEQ ID NO: 4342 - DNA, 16 bp, Homo sapiens
tgccaaggtgaggtca

SEQ ID NO: 4343 - DNA, 16 bp, Homo sapiens
ccaataactgacctca

SEQ ID NO: 4344 - DNA, 20 bp, Homo sapiens
tgatatcctcaaggtcaccc

SEQ ID NO: 4345 - DNA, 16 bp, Homo sapiens
gcctagaagagctatg

SEQ ID NO: 4346 - DNA, 20 bp, Homo sapiens
gttatctgcttcctccaacc

SEQ ID NO: 4347 - DNA, 16 bp, Homo sapiens
acacaatgacgaggct

SEQ ID NO: 4348 - DNA, 16 bp, Homo sapiens
gtattgattagctcct

SEQ ID NO: 4349 - DNA, 16 bp, Homo sapiens
cgtcaatactaaaata

SEQ ID NO: 4350 - DNA, 16 bp, Homo sapiens
gttgacaccatgcttg

SEQ ID NO: 4351 - DNA, 14 bp, Homo sapiens
tgttctgaatgtcc

SEQ ID NO: 4352 - DNA, 14 bp, Homo sapiens
cagtctgcttcgca

SEQ ID NO: 4353 - DNA, 17 bp, Homo sapiens
ataaattgtcatcacca

SEQ ID NO: 4354 - DNA, 15 bp, Homo sapiens
tacctgtggactggg

SEQ ID NO: 4355 - DNA, 18 bp, Homo sapiens
cgctgcccaatgccatcc

SEQ ID NO: 4356 - DNA, 16 bp, Homo sapiens
tcccaagctcccctga

SEQ ID NO: 4357 - DNA, 16 bp, Homo sapiens
cctgtttggactgttt

SEQ ID NO: 4358 - DNA, 16 bp, Homo sapiens
tgcaagcacctgagcc

SEQ ID NO: 4359 - DNA, 18 bp, Homo sapiens
ctccggttctgaaggtgt

SEQ ID NO: 4360 - DNA, 16 bp, Homo sapiens
tcaagtatagagatgg

SEQ ID NO: 4361 - DNA, 16 bp, Homo sapiens
tgcgaatgcacatggc

SEQ ID NO: 4362 - DNA, 16 bp, Homo sapiens
ctaatacacaatgatc

SEQ ID NO: 4363 - DNA, 16 bp, Homo sapiens
ggaatagggcaaggcc

SEQ ID NO: 4364 - DNA, 20 bp, Homo sapiens
gctggcaaagtgactataga

SEQ ID NO: 4365 - DNA, 16 bp, Homo sapiens
ttatagggcttcttat

SEQ ID NO: 4366 - DNA, 12 bp, Homo sapiens
tgggtggccggg

SEQ ID NO: 4367 - DNA, 19 bp, Homo sapiens
catcctttggcccaccgtg

SEQ ID NO: 4368 - DNA, 18 bp, Homo sapiens
ttcattgtggctcaggtt

SEQ ID NO: 4369 - DNA, 16 bp, Homo sapiens
ccggtggccatggagg

SEQ ID NO: 4370 - DNA, 16 bp, Homo sapiens
ccccaaggtctggagt

SEQ ID NO: 4371 - DNA, 20 bp, Homo sapiens
tttgtctctggtccttactt

SEQ ID NO: 4372 - DNA, 14 bp, Homo sapiens
gaggtatcccatct

SEQ ID NO: 4373 - DNA, 16 bp, Homo sapiens
cacatagcccaagccc

SEQ ID NO: 4374 - DNA, 16 bp, Homo sapiens
acaaatacatgaggtc

SEQ ID NO: 4375 - DNA, 20 bp, Homo sapiens
atatattgtgcaattgtggc

SEQ ID NO: 4376 - DNA, 16 bp, Homo sapiens
cagagtgtccacctga

SEQ ID NO: 4377 - DNA, 16 bp, Homo sapiens
cacgaagtgaatggaa

SEQ ID NO: 4378 - DNA, 20 bp, Homo sapiens
caccctctgtgattttataa

SEQ ID NO: 4379 - DNA, 16 bp, Homo sapiens
agccattggtcaccca

SEQ ID NO: 4380 - DNA, 16 bp, Homo sapiens
gttatatgtgtggcat

SEQ ID NO: 4381 - DNA, 15 bp, Homo sapiens
aattaaccatatacc

SEQ ID NO: 4382 - DNA, 16 bp, Homo sapiens
taatgacccaggctgg

SEQ ID NO: 4383 - DNA, 16 bp, Homo sapiens
caacacagagggtgcg

SEQ ID NO: 4384 - DNA, 16 bp, Homo sapiens
gtagtataccaaggtt

SEQ ID NO: 4385 - DNA, 20 bp, Homo sapiens
cacctttgcccaagtcatct

SEQ ID NO: 4386 - DNA, 16 bp, Homo sapiens
agatttatgcgattgg

SEQ ID NO: 4387 - DNA, 16 bp, Homo sapiens
gataatggtgggccgg

SEQ ID NO: 4388 - DNA, 20 bp, Homo sapiens
caggccttcagtcagtcctt

SEQ ID NO: 4389 - DNA, 14 bp, Homo sapiens
actttgtggtgcca

SEQ ID NO: 4390 - DNA, 16 bp, Homo sapiens
tttcagcttgacgacc

SEQ ID NO: 4391 - DNA, 20 bp, Homo sapiens
tctccacggccatggtcatc

SEQ ID NO: 4392 - DNA, 20 bp, Homo sapiens
caaagttaaagcatcaggtt

SEQ ID NO: 4393 - DNA, 16 bp, Homo sapiens
tgacaccaaactgagc

SEQ ID NO: 4394 - DNA, 16 bp, Homo sapiens
tcgaatgccaagtccg

SEQ ID NO: 4395 - DNA, 21 bp, Homo sapiens
tctcaggaatttgtgtctttc

SEQ ID NO: 4396 - DNA, 16 bp, Homo sapiens
ttatatagatggagca

SEQ ID NO: 4397 - DNA, 16 bp, Homo sapiens
agctctggtttcaaca

SEQ ID NO: 4398 - DNA, 16 bp, Homo sapiens
caccactgcacggcct

SEQ ID NO: 4399 - DNA, 16 bp, Homo sapiens
ttgtagttggcaatcc

SEQ ID NO: 4400 - DNA, 14 bp, Homo sapiens
cccagtactacctg

SEQ ID NO: 4401 - DNA, 16 bp, Homo sapiens
acagaccacaaggctc

SEQ ID NO: 4402 - DNA, 16 bp, Homo sapiens
aaaaatatacgggcat

SEQ ID NO: 4403 - DNA, 16 bp, Homo sapiens
acagaagccgggcttc

SEQ ID NO: 4404 - DNA, 16 bp, Homo sapiens
tctattaccgtaattc

SEQ ID NO: 4405 - DNA, 20 bp, Homo sapiens
caacacccacctgctgtatt

SEQ ID NO: 4406 - DNA, 16 bp, Homo sapiens
gatagtcggttgtctg

SEQ ID NO: 4407 - DNA, 16 bp, Homo sapiens
ggatggtgtcaagggt

SEQ ID NO: 4408 - DNA, 16 bp, Homo sapiens
agcaatcgcacatgcc

SEQ ID NO: 4409 - DNA, 18 bp, Homo sapiens
aagtgctaccgtggagag

SEQ ID NO: 4410 - DNA, 14 bp, Homo sapiens
tggtgcaggtccag

SEQ ID NO: 4411 - DNA, 16 bp, Homo sapiens
tgcgctcctcgcccgc

SEQ ID NO: 4412 - DNA, 16 bp, Homo sapiens
taacaggtcttgtgca

SEQ ID NO: 4413 - DNA, 14 bp, Homo sapiens
gatcaccttcagag

SEQ ID NO: 4414 - DNA, 14 bp, Homo sapiens
tgttgccacattgc

SEQ ID NO: 4415 - DNA, 20 bp, Homo sapiens
gtctccaacatgcctctctt

SEQ ID NO: 4416 - DNA, 15 bp, Homo sapiens
gccgctgcccaatgc

SEQ ID NO: 4417 - DNA, 20 bp, Homo sapiens
cttcatttccacctttgccc

SEQ ID NO: 4418 - DNA, 18 bp, Homo sapiens
ttcttcaccaaagcatca

SEQ ID NO: 4419 - DNA, 16 bp, Homo sapiens
acttacagtggtcaaa

SEQ ID NO: 4420 - DNA, 16 bp, Homo sapiens
ttccaccaacagccac

SEQ ID NO: 4421 - DNA, 16 bp, Homo sapiens
taaaggattaatctgg

SEQ ID NO: 4422 - DNA, 16 bp, Homo sapiens
agcgagagggcatacc

SEQ ID NO: 4423 - DNA, 16 bp, Homo sapiens
ccggatgtaagtggtg

SEQ ID NO: 4424 - DNA, 16 bp, Homo sapiens
catcaactcgcctgct

SEQ ID NO: 4425 - DNA, 20 bp, Homo sapiens
tgggttcacaaatcagcacc

SEQ ID NO: 4426 - DNA, 16 bp, Homo sapiens
ctcctgctaatgggaa

SEQ ID NO: 4427 - DNA, 16 bp, Homo sapiens
tgtatatgagcccatc

SEQ ID NO: 4428 - DNA, 20 bp, Homo sapiens
attgtagccaggcttctaaa

SEQ ID NO: 4429 - DNA, 16 bp, Homo sapiens
ccacaagttcaggcct

SEQ ID NO: 4430 - DNA, 16 bp, Homo sapiens
ctgagcgaggagtggg

SEQ ID NO: 4431 - DNA, 16 bp, Homo sapiens
gatggtgtcaagggtt

SEQ ID NO: 4432 - DNA, 18 bp, Homo sapiens
gccacgatgacttccttc

SEQ ID NO: 4433 - DNA, 16 bp, Homo sapiens
accaaccaagtcatgg

SEQ ID NO: 4434 - DNA, 16 bp, Homo sapiens
tccaggctcggcgcaa

SEQ ID NO: 4435 - DNA, 16 bp, Homo sapiens
gaagagtggtggtttc

SEQ ID NO: 4436 - DNA, 16 bp, Homo sapiens
cgagatcacaaatgct

SEQ ID NO: 4437 - DNA, 16 bp, Homo sapiens
accgtatatgtctccg

SEQ ID NO: 4438 - DNA, 16 bp, Homo sapiens
ccgaccctcaacgacc

SEQ ID NO: 4439 - DNA, 16 bp, Homo sapiens
agcttgacgacctgct

SEQ ID NO: 4440 - DNA, 20 bp, Homo sapiens
ttcatttccacctttgccca

SEQ ID NO: 4441 - DNA, 16 bp, Homo sapiens
ctcaaatgggaaccgc

SEQ ID NO: 4442 - DNA, 20 bp, Homo sapiens
cctcaaggtcacccaccatc

SEQ ID NO: 4443 - DNA, 16 bp, Homo sapiens
tgtttctataaggttc

SEQ ID NO: 4444 - DNA, 16 bp, Homo sapiens
aggaatagggcaaggc

SEQ ID NO: 4445 - DNA, 16 bp, Homo sapiens
gacattgctgtcgcag

SEQ ID NO: 4446 - DNA, 18 bp, Homo sapiens
attacaccagttcgtccc

SEQ ID NO: 4447 - DNA, 16 bp, Homo sapiens
ccagagtgtccacctg

SEQ ID NO: 4448 - DNA, 16 bp, Homo sapiens
gcccagctaactaact

SEQ ID NO: 4449 - DNA, 14 bp, Homo sapiens
ctcagggttgaagc

SEQ ID NO: 4450 - DNA, 16 bp, Homo sapiens
ctttggttttgcgggt

SEQ ID NO: 4451 - DNA, 16 bp, Homo sapiens
gttaaggaagaggcca

SEQ ID NO: 4452 - DNA, 20 bp, Homo sapiens
agtcctttaatgcttcccca

SEQ ID NO: 4453 - DNA, 16 bp, Homo sapiens
tgcagctgtcagcatg

SEQ ID NO: 4454 - DNA, 16 bp, Homo sapiens
gccaatcctgttatat

SEQ ID NO: 4455 - DNA, 16 bp, Homo sapiens
cgacagagctgtttaa

SEQ ID NO: 4456 - DNA, 18 bp, Homo sapiens
ctgggagctgaaatggac

SEQ ID NO: 4457 - DNA, 16 bp, Homo sapiens
cgcaatgtgttcattt

SEQ ID NO: 4458 - DNA, 20 bp, Homo sapiens
atacaggtcattgaaacaga

SEQ ID NO: 4459 - DNA, 25 bp, Homo sapiens
gttctgaaggtgttcttgtacttca

SEQ ID NO: 4460 - DNA, 20 bp, Homo sapiens
agaacttatcctacttaaca

SEQ ID NO: 4461 - DNA, 20 bp, Homo sapiens
tgataatattcataaattga

SEQ ID NO: 4462 - DNA, 18 bp, Homo sapiens
taagggctgtttggagat

SEQ ID NO: 4463 - DNA, 16 bp, Homo sapiens
accaaaccaggaccaa

SEQ ID NO: 4464 - DNA, 16 bp, Homo sapiens
accttatctcttacac

SEQ ID NO: 4465 - DNA, 20 bp, Homo sapiens
cataaatcagtttctcacta

SEQ ID NO: 4466 - DNA, 20 bp, Homo sapiens
cagacatatccacctctttt

SEQ ID NO: 4467 - DNA, 16 bp, Homo sapiens
tggatatccagaccca

SEQ ID NO: 4468 - DNA, 16 bp, Homo sapiens
gaaacaaccaatatcc

SEQ ID NO: 4469 - DNA, 12 bp, Homo sapiens
ggtgtcagaata

SEQ ID NO: 4470 - DNA, 16 bp, Homo sapiens
tagaatacagagtgca

SEQ ID NO: 4471 - DNA, 16 bp, Homo sapiens
gaagaattcacacgga

SEQ ID NO: 4472 - DNA, 16 bp, Homo sapiens
gccgagatgggatctg

SEQ ID NO: 4473 - DNA, 19 bp, Homo sapiens
tgcctctcttcatcctttg

SEQ ID NO: 4474 - DNA, 16 bp, Homo sapiens
tcgggccgaaagttct

SEQ ID NO: 4475 - DNA, 16 bp, Homo sapiens
ggcagcatggctaagc

SEQ ID NO: 4476 - DNA, 16 bp, Homo sapiens
cccaagagtaaaatac

SEQ ID NO: 4477 - DNA, 16 bp, Homo sapiens
atcataacaggctgta

SEQ ID NO: 4478 - DNA, 12 bp, Homo sapiens
gcaatttaatcc

SEQ ID NO: 4479 - DNA, 25 bp, Homo sapiens
atgggatccagtatacttacaggct

SEQ ID NO: 4480 - DNA, 18 bp, Homo sapiens
aacccaagcagaatctac

SEQ ID NO: 4481 - DNA, 20 bp, Homo sapiens
gaaatgtaaatcatgtcacc

SEQ ID NO: 4482 - DNA, 16 bp, Homo sapiens
cacaagagggcaagat

SEQ ID NO: 4483 - DNA, 16 bp, Homo sapiens
caacagataagcccac

SEQ ID NO: 4484 - DNA, 16 bp, Homo sapiens
acaaatgggtctcgag

SEQ ID NO: 4485 - DNA, 16 bp, Homo sapiens
atggtgtcaagggttc

SEQ ID NO: 4486 - DNA, 20 bp, Homo sapiens
tcacttcaatcttcaggtcg

SEQ ID NO: 4487 - DNA, 16 bp, Homo sapiens
caatagatatctagat

SEQ ID NO: 4488 - DNA, 16 bp, Homo sapiens
gtgaattcaatgtcca

SEQ ID NO: 4489 - DNA, 19 bp, Homo sapiens
gtacattaagatggacttc

SEQ ID NO: 4490 - DNA, 16 bp, Homo sapiens
aggcaatgcatacagt

SEQ ID NO: 4491 - DNA, 16 bp, Homo sapiens
tccaaaggagggcccc

SEQ ID NO: 4492 - DNA, 16 bp, Homo sapiens
tgctaggcttggtatc

SEQ ID NO: 4493 - DNA, 16 bp, Homo sapiens
tcggcaggagcccaca

SEQ ID NO: 4494 - DNA, 16 bp, Homo sapiens
acacatgcagtgagcc

SEQ ID NO: 4495 - DNA, 16 bp, Homo sapiens
ggatgaggttgtgtgg

SEQ ID NO: 4496 - DNA, 16 bp, Homo sapiens
tctcaggcgacacccg

SEQ ID NO: 4497 - DNA, 14 bp, Homo sapiens
atttctcttacagg

SEQ ID NO: 4498 - DNA, 20 bp, Homo sapiens
acaggcttgaatgacaaaga

SEQ ID NO: 4499 - DNA, 16 bp, Homo sapiens
gccaatgcaaggtggc

SEQ ID NO: 4500 - DNA, 16 bp, Homo sapiens
actaaatatagcaggg

SEQ ID NO: 4501 - DNA, 16 bp, Homo sapiens
atatatatgtggaggc

SEQ ID NO: 4502 - DNA, 16 bp, Homo sapiens
ctgccctacatgggct

SEQ ID NO: 4503 - DNA, 16 bp, Homo sapiens
gggagctcctgctaat

SEQ ID NO: 4504 - DNA, 20 bp, Homo sapiens
tgcatggaaccacaatccag

SEQ ID NO: 4505 - DNA, 16 bp, Homo sapiens
ctaacctaggccgggt

SEQ ID NO: 4506 - DNA, 16 bp, Homo sapiens
gaggtgacggaaccgc

SEQ ID NO: 4507 - DNA, 20 bp, Homo sapiens
ttgggcgtggagcagctgct

SEQ ID NO: 4508 - DNA, 16 bp, Homo sapiens
gggccaggcttgccgc

SEQ ID NO: 4509 - DNA, 16 bp, Homo sapiens
gccgaggagtataggt

SEQ ID NO: 4510 - DNA, 16 bp, Homo sapiens
gtaaatttgaagctta

SEQ ID NO: 4511 - DNA, 16 bp, Homo sapiens
tgccctaaggcaagtg

SEQ ID NO: 4512 - DNA, 20 bp, Homo sapiens
ccgtcgcccttcagcacgca

SEQ ID NO: 4513 - DNA, 18 bp, Homo sapiens
cagattaataactgtagc

SEQ ID NO: 4514 - DNA, 16 bp, Homo sapiens
tgttattaaggacaac

SEQ ID NO: 4515 - DNA, 16 bp, Homo sapiens
gcgattgattcgggcg

SEQ ID NO: 4516 - DNA, 18 bp, Homo sapiens
cccacacgattgttgagc

SEQ ID NO: 4517 - DNA, 16 bp, Homo sapiens
tcatattgttctgccc

SEQ ID NO: 4518 - DNA, 16 bp, Homo sapiens
tggtcctagcccgtcc

SEQ ID NO: 4519 - DNA, 16 bp, Homo sapiens
ggattttaggaggtga

SEQ ID NO: 4520 - DNA, 16 bp, Homo sapiens
tgtgaatgggcacatg

SEQ ID NO: 4521 - DNA, 16 bp, Homo sapiens
tcaataagtaactctg

SEQ ID NO: 4522 - DNA, 12 bp, Homo sapiens
aggacttgggat

SEQ ID NO: 4523 - DNA, 16 bp, Homo sapiens
acaaggacaggaacct

SEQ ID NO: 4524 - DNA, 16 bp, Homo sapiens
ccacaaatgaatggta

SEQ ID NO: 4525 - DNA, 16 bp, Homo sapiens
ttacaggccaaaagcc

SEQ ID NO: 4526 - DNA, 16 bp, Homo sapiens
tcacatacagacccca

SEQ ID NO: 4527 - DNA, 14 bp, Homo sapiens
ttacagtgaattgc

SEQ ID NO: 4528 - DNA, 16 bp, Homo sapiens
ccgggcctcggcaaga

SEQ ID NO: 4529 - DNA, 16 bp, Homo sapiens
taaaatgcgcatcata

SEQ ID NO: 4530 - DNA, 16 bp, Homo sapiens
ggaactaacacatgct

SEQ ID NO: 4531 - DNA, 16 bp, Homo sapiens
ccgttagccatccacc

SEQ ID NO: 4532 - DNA, 16 bp, Homo sapiens
aaggccggcccgggcc

SEQ ID NO: 4533 - DNA, 18 bp, Homo sapiens
gtgccgcaaaaggtcttc

SEQ ID NO: 4534 - DNA, 14 bp, Homo sapiens
catcggccccagga

SEQ ID NO: 4535 - DNA, 16 bp, Homo sapiens
gaggattattacatga

SEQ ID NO: 4536 - DNA, 16 bp, Homo sapiens
gaggtcactgttggca

SEQ ID NO: 4537 - DNA, 20 bp, Homo sapiens
gtctttgtactttcttcatt

SEQ ID NO: 4538 - DNA, 16 bp, Homo sapiens
ccaaggtctgaacttt

SEQ ID NO: 4539 - DNA, 16 bp, Homo sapiens
aaaatctcggccggga

SEQ ID NO: 4540 - DNA, 20 bp, Homo sapiens
ataaatcagtttctcactac

SEQ ID NO: 4541 - DNA, 16 bp, Homo sapiens
ggaaccgctctgtatc

SEQ ID NO: 4542 - DNA, 16 bp, Homo sapiens
aatgaacgaacaacac

SEQ ID NO: 4543 - DNA, 23 bp, Homo sapiens
tcaccctttccacaggcgttgca

SEQ ID NO: 4544 - DNA, 16 bp, Homo sapiens
atcctgttatatcttt

SEQ ID NO: 4545 - DNA, 16 bp, Homo sapiens
aggtgtttttccacct

SEQ ID NO: 4546 - DNA, 16 bp, Homo sapiens
ggcgatggcacgacca

SEQ ID NO: 4547 - DNA, 24 bp, Homo sapiens
gatcctgtcggaagtcaatgtaga

SEQ ID NO: 4548 - DNA, 16 bp, Homo sapiens
tgaaatctacctactc

SEQ ID NO: 4549 - DNA, 16 bp, Homo sapiens
tggtgtcaagggttct

SEQ ID NO: 4550 - DNA, 16 bp, Homo sapiens
acggaaccgctctgta

SEQ ID NO: 4551 - DNA, 16 bp, Homo sapiens
cttctcggcacacttt

SEQ ID NO: 4552 - DNA, 16 bp, Homo sapiens
gctattaatcatattc

SEQ ID NO: 4553 - DNA, 16 bp, Homo sapiens
ctcaggcgacacccga

SEQ ID NO: 4554 - DNA, 16 bp, Homo sapiens
cgattcctgaaccgcg

SEQ ID NO: 4555 - DNA, 16 bp, Homo sapiens
tgctattataactcct

SEQ ID NO: 4556 - DNA, 16 bp, Homo sapiens
gcactcatcacgcaca

SEQ ID NO: 4557 - DNA, 14 bp, Homo sapiens
ccaggcatggagct

SEQ ID NO: 4558 - DNA, 16 bp, Homo sapiens
ggttttaatagacaca

SEQ ID NO: 4559 - DNA, 14 bp, Homo sapiens
caggaaggatagga

SEQ ID NO: 4560 - DNA, 16 bp, Homo sapiens
tggaatccagtatttc

SEQ ID NO: 4561 - DNA, 16 bp, Homo sapiens
tattgattagctcctg

SEQ ID NO: 4562 - DNA, 16 bp, Homo sapiens
atccaccccaaactgc

SEQ ID NO: 4563 - DNA, 16 bp, Homo sapiens
aacttacaagcatcgg

SEQ ID NO: 4564 - DNA, 16 bp, Homo sapiens
agcatgtataagctca

SEQ ID NO: 4565 - DNA, 16 bp, Homo sapiens
ccccaactgggagagg

SEQ ID NO: 4566 - DNA, 16 bp, Homo sapiens
gctctgagaccacgag

SEQ ID NO: 4567 - DNA, 16 bp, Homo sapiens
tgtcaccccagccgaa

SEQ ID NO: 4568 - DNA, 16 bp, Homo sapiens
gctacagcaatataga

SEQ ID NO: 4569 - DNA, 16 bp, Homo sapiens
aaggagctgaggaaca

SEQ ID NO: 4570 - DNA, 16 bp, Homo sapiens
aatgataaaggctggc

SEQ ID NO: 4571 - DNA, 16 bp, Homo sapiens
gaaaccaacatgaggc

SEQ ID NO: 4572 - DNA, 16 bp, Homo sapiens
aggagaggagatctgc

SEQ ID NO: 4573 - DNA, 16 bp, Homo sapiens
gcctcacggtcgccgc

SEQ ID NO: 4574 - DNA, 16 bp, Homo sapiens
ctgtttgagttttctc

SEQ ID NO: 4575 - DNA, 16 bp, Homo sapiens
cattatcccttgacaa

SEQ ID NO: 4576 - DNA, 16 bp, Homo sapiens
gcgaagagcaacatta

SEQ ID NO: 4577 - DNA, 12 bp, Homo sapiens
ctattcccactg

SEQ ID NO: 4578 - DNA, 12 bp, Homo sapiens
caatgaccagca

SEQ ID NO: 4579 - DNA, 18 bp, Homo sapiens
atctgtgaatccatctac

SEQ ID NO: 4580 - DNA, 16 bp, Homo sapiens
aagcagggatcctctg

SEQ ID NO: 4581 - DNA, 20 bp, Homo sapiens
atatttatttatacaaagat

SEQ ID NO: 4582 - DNA, 20 bp, Homo sapiens
attcacaggcttgaatgaca

SEQ ID NO: 4583 - DNA, 16 bp, Homo sapiens
tcacgaggaagccatg

SEQ ID NO: 4584 - DNA, 20 bp, Homo sapiens
agtttcctcacacgcaaata

SEQ ID NO: 4585 - DNA, 14 bp, Homo sapiens
agtctgcttcgcac

SEQ ID NO: 4586 - DNA, 16 bp, Homo sapiens
tcagtatgcaccacca

SEQ ID NO: 4587 - DNA, 16 bp, Homo sapiens
gtaaagggtggcagcc

SEQ ID NO: 4588 - DNA, 16 bp, Homo sapiens
atgcagtggtttggca

SEQ ID NO: 4589 - DNA, 16 bp, Homo sapiens
cctcgaatgccaagtc

SEQ ID NO: 4590 - DNA, 16 bp, Homo sapiens
cgataatgacctaaat

SEQ ID NO: 4591 - DNA, 16 bp, Homo sapiens
tagcactacaatcatt

SEQ ID NO: 4592 - DNA, 16 bp, Homo sapiens
gattcctgaaccgcgg

SEQ ID NO: 4593 - DNA, 20 bp, Homo sapiens
catggtagaattcataggct

SEQ ID NO: 4594 - DNA, 16 bp, Homo sapiens
caaccaaggtctgaac

SEQ ID NO: 4595 - DNA, 12 bp, Homo sapiens
caatattgttcc

SEQ ID NO: 4596 - DNA, 16 bp, Homo sapiens
caagggttctggtccc

SEQ ID NO: 4597 - DNA, 16 bp, Homo sapiens
ccataacttactgaag

SEQ ID NO: 4598 - DNA, 16 bp, Homo sapiens
gtcaaggctgtctgag

SEQ ID NO: 4599 - DNA, 16 bp, Homo sapiens
gccattcacgggctgc

SEQ ID NO: 4600 - DNA, 16 bp, Homo sapiens
aaaagctacgcaggta

SEQ ID NO: 4601 - DNA, 16 bp, Homo sapiens
gcattaacagagcagg

SEQ ID NO: 4602 - DNA, 16 bp, Homo sapiens
agtgactgagttctgc

SEQ ID NO: 4603 - DNA, 16 bp, Homo sapiens
ggctaaatcaatcttg

SEQ ID NO: 4604 - DNA, 16 bp, Homo sapiens
gtgacgattcgctctg

SEQ ID NO: 4605 - DNA, 14 bp, Homo sapiens
ccagcacactggaa

SEQ ID NO: 4606 - DNA, 16 bp, Homo sapiens
caccgcggcttctcaa

SEQ ID NO: 4607 - DNA, 16 bp, Homo sapiens
gtaaaaagcatctggc

SEQ ID NO: 4608 - DNA, 16 bp, Homo sapiens
caatgaggacatctgc

SEQ ID NO: 4609 - DNA, 16 bp, Homo sapiens
ctcgaaggttgatggg

SEQ ID NO: 4610 - DNA, 18 bp, Homo sapiens
ggctgctttgccctcagc

SEQ ID NO: 4611 - DNA, 18 bp, Homo sapiens
cacgccatgatggactcc

SEQ ID NO: 4612 - DNA, 16 bp, Homo sapiens
acgattcgctctgtct

SEQ ID NO: 4613 - DNA, 20 bp, Homo sapiens
ccagttagttcaaactgagt

SEQ ID NO: 4614 - DNA, 16 bp, Homo sapiens
gcacatagggccttct

SEQ ID NO: 4615 - DNA, 16 bp, Homo sapiens
gttaatatggccggga

SEQ ID NO: 4616 - DNA, 16 bp, Homo sapiens
tgtatggacagcaggc

SEQ ID NO: 4617 - DNA, 16 bp, Homo sapiens
gcattttaatattggg

SEQ ID NO: 4618 - DNA, 12 bp, Homo sapiens
caagtctaagtc

SEQ ID NO: 4619 - DNA, 18 bp, Homo sapiens
aggcaccatccccaacga

SEQ ID NO: 4620 - DNA, 16 bp, Homo sapiens
tgtttaaggactccac

SEQ ID NO: 4621 - DNA, 16 bp, Homo sapiens
aaaatacgaggaaagt

SEQ ID NO: 4622 - DNA, 16 bp, Homo sapiens
agtgctgcacggatgt

SEQ ID NO: 4623 - DNA, 20 bp, Homo sapiens
tatcatgatgagttttggtc

SEQ ID NO: 4624 - DNA, 16 bp, Homo sapiens
ttgtagtgatcagttt

SEQ ID NO: 4625 - DNA, 16 bp, Homo sapiens
tcagacttgaggatgt

SEQ ID NO: 4626 - DNA, 16 bp, Homo sapiens
aaaggaataggtggga

SEQ ID NO: 4627 - DNA, 16 bp, Homo sapiens
tgttaggcaaattaat

SEQ ID NO: 4628 - DNA, 16 bp, Homo sapiens
tagcaaaggcacctct

SEQ ID NO: 4629 - DNA, 16 bp, Homo sapiens
ccaaagcatagagtag

SEQ ID NO: 4630 - DNA, 16 bp, Homo sapiens
agtaaatgtatctggt

SEQ ID NO: 4631 - DNA, 20 bp, Homo sapiens
atgaacttgctgatgttttc

SEQ ID NO: 4632 - DNA, 16 bp, Homo sapiens
tcctaagcattcctaa

SEQ ID NO: 4633 - DNA, 16 bp, Homo sapiens
tcccgtatcggcccct

SEQ ID NO: 4634 - DNA, 16 bp, Homo sapiens
ccacaattcaggtggc

SEQ ID NO: 4635 - DNA, 16 bp, Homo sapiens
aatctcctgccggact

SEQ ID NO: 4636 - DNA, 16 bp, Homo sapiens
ccacaaggccccgccg

SEQ ID NO: 4637 - DNA, 16 bp, Homo sapiens
gctaacaatttaagga

SEQ ID NO: 4638 - DNA, 16 bp, Homo sapiens
caaaactggttgacaa

SEQ ID NO: 4639 - DNA, 12 bp, Homo sapiens
ccgcccagttcc

SEQ ID NO: 4640 - DNA, 16 bp, Homo sapiens
gagcatgggcccgcag

SEQ ID NO: 4641 - DNA, 20 bp, Homo sapiens
caaagcatgataatattcat

SEQ ID NO: 4642 - DNA, 16 bp, Homo sapiens
ctttgcgcagtgcggt

SEQ ID NO: 4643 - DNA, 12 bp, Homo sapiens
agaccacaaact

SEQ ID NO: 4644 - DNA, 16 bp, Homo sapiens
tgcaaaactggttgac

SEQ ID NO: 4645 - DNA, 20 bp, Homo sapiens
tgcaagtggacagagagagg

SEQ ID NO: 4646 - DNA, 16 bp, Homo sapiens
gtacagacttatccct

SEQ ID NO: 4647 - DNA, 16 bp, Homo sapiens
gatactagggcactta

SEQ ID NO: 4648 - DNA, 16 bp, Homo sapiens
ggcttaagtgtgtaac

SEQ ID NO: 4649 - DNA, 18 bp, Homo sapiens
gcactaatactggaggta

SEQ ID NO: 4650 - DNA, 16 bp, Homo sapiens
tgggcccacccatcag

SEQ ID NO: 4651 - DNA, 16 bp, Homo sapiens
ccttaaggaactccat

SEQ ID NO: 4652 - DNA, 16 bp, Homo sapiens
gatcaggctactcagg

SEQ ID NO: 4653 - DNA, 16 bp, Homo sapiens
acgcacactgaatcga

SEQ ID NO: 4654 - DNA, 16 bp, Homo sapiens
gggtatggttgcaacc

SEQ ID NO: 4655 - DNA, 16 bp, Homo sapiens
ggataattggagaggg

SEQ ID NO: 4656 - DNA, 16 bp, Homo sapiens
taaattactattcgac

SEQ ID NO: 4657 - DNA, 16 bp, Homo sapiens
cccggtggccatggag

SEQ ID NO: 4658 - DNA, 14 bp, Homo sapiens
gtggtacaggtcga

SEQ ID NO: 4659 - DNA, 16 bp, Homo sapiens
ccaaatagggatgagg

SEQ ID NO: 4660 - DNA, 16 bp, Homo sapiens
agccgcccaggccaga

SEQ ID NO: 4661 - DNA, 16 bp, Homo sapiens
gccaactaattcctcc

SEQ ID NO: 4662 - DNA, 12 bp, Homo sapiens
ccaatgaccagc

SEQ ID NO: 4663 - DNA, 20 bp, Homo sapiens
atgctgtggcggctcaggaa

SEQ ID NO: 4664 - DNA, 16 bp, Homo sapiens
ccaagtgagcagccac

SEQ ID NO: 4665 - DNA, 20 bp, Homo sapiens
tttgcaagtgcatcttcatg

SEQ ID NO: 4666 - DNA, 20 bp, Homo sapiens
gataacagatgagttaaggg

SEQ ID NO: 4667 - DNA, 18 bp, Homo sapiens
ggaggagttctggaacca

SEQ ID NO: 4668 - DNA, 16 bp, Homo sapiens
gctcatctaatggaca

SEQ ID NO: 4669 - DNA, 16 bp, Homo sapiens
ggccgggtccccaaca

SEQ ID NO: 4670 - DNA, 16 bp, Homo sapiens
tcaaactgagcgagga

SEQ ID NO: 4671 - DNA, 16 bp, Homo sapiens
atctacagttggtggc

SEQ ID NO: 4672 - DNA, 16 bp, Homo sapiens
gctaatccctgactca

SEQ ID NO: 4673 - DNA, 18 bp, Homo sapiens
atccggttctcgttgtcc

SEQ ID NO: 4674 - DNA, 16 bp, Homo sapiens
cagctgtcagcatgat

SEQ ID NO: 4675 - DNA, 16 bp, Homo sapiens
gtcaatcgactggtac

SEQ ID NO: 4676 - DNA, 16 bp, Homo sapiens
cgccagcttggtctgc

SEQ ID NO: 4677 - DNA, 16 bp, Homo sapiens
gtacattaaaggctcg

SEQ ID NO: 4678 - DNA, 16 bp, Homo sapiens
tgaagatggcgaagac

SEQ ID NO: 4679 - DNA, 14 bp, Homo sapiens
cagggcagatcctt

SEQ ID NO: 4680 - DNA, 16 bp, Homo sapiens
atgcaagggactgcgc

SEQ ID NO: 4681 - DNA, 16 bp, Homo sapiens
tacgaaatagcagagc

SEQ ID NO: 4682 - DNA, 16 bp, Homo sapiens
gactaaagaccactaa

SEQ ID NO: 4683 - DNA, 16 bp, Homo sapiens
ccaggatgaagttggt

SEQ ID NO: 4684 - DNA, 16 bp, Homo sapiens
actgttggcaaacacg

SEQ ID NO: 4685 - DNA, 16 bp, Homo sapiens
cttgatctggtactcg

SEQ ID NO: 4686 - DNA, 16 bp, Homo sapiens
atcataaatgtccagc

SEQ ID NO: 4687 - DNA, 18 bp, Homo sapiens
atccgcttggactccttc

SEQ ID NO: 4688 - DNA, 30 bp, Homo sapiens
tccaactggggacgcctctgttccaaatcc

SEQ ID NO: 4689 - DNA, 16 bp, Homo sapiens
ggcaatgcatacagtc

SEQ ID NO: 4690 - DNA, 16 bp, Homo sapiens
gttactagacttatag

SEQ ID NO: 4691 - DNA, 16 bp, Homo sapiens
gatgataacacagcct

SEQ ID NO: 4692 - DNA, 16 bp, Homo sapiens
cgctctaatgtcctga

SEQ ID NO: 4693 - DNA, 14 bp, Homo sapiens
ccctaggttgaata

SEQ ID NO: 4694 - DNA, 16 bp, Homo sapiens
agtgacatagcaagca

SEQ ID NO: 4695 - DNA, 16 bp, Homo sapiens
agcacttggacagcct

SEQ ID NO: 4696 - DNA, 16 bp, Homo sapiens
ttctagttcactacag

SEQ ID NO: 4697 - DNA, 20 bp, Homo sapiens
cattagcagtaggttcttgt

SEQ ID NO: 4698 - DNA, 16 bp, Homo sapiens
gaatgagaggccgccg

SEQ ID NO: 4699 - DNA, 20 bp, Homo sapiens
atttttctccactgaggaca

SEQ ID NO: 4700 - DNA, 16 bp, Homo sapiens
gtaacaaccgctggga

SEQ ID NO: 4701 - DNA, 16 bp, Homo sapiens
agcaatagggaagagc

SEQ ID NO: 4702 - DNA, 16 bp, Homo sapiens
gtaattcactgcggat

SEQ ID NO: 4703 - DNA, 16 bp, Homo sapiens
ggtttaataatgtgca

SEQ ID NO: 4704 - DNA, 16 bp, Homo sapiens
gttctcccctcccgtt

SEQ ID NO: 4705 - DNA, 14 bp, Homo sapiens
ctctggtccttact

SEQ ID NO: 4706 - DNA, 20 bp, Homo sapiens
tcagcactacttcgaagtgg

SEQ ID NO: 4707 - DNA, 16 bp, Homo sapiens
ccacaagggacaaagg

SEQ ID NO: 4708 - DNA, 16 bp, Homo sapiens
gaacatagcactgccc

SEQ ID NO: 4709 - DNA, 16 bp, Homo sapiens
gtataaggacggccca

SEQ ID NO: 4710 - DNA, 17 bp, Homo sapiens
tggcatttctagtttgg

SEQ ID NO: 4711 - DNA, 25 bp, Homo sapiens
ataatgaaaacgccgccatttctca

SEQ ID NO: 4712 - DNA, 16 bp, Homo sapiens
gatgatgggttctagc

SEQ ID NO: 4713 - DNA, 14 bp, Homo sapiens
ggctcactgtatgg

SEQ ID NO: 4714 - DNA, 16 bp, Homo sapiens
ctctaggcttaccaca

SEQ ID NO: 4715 - DNA, 14 bp, Homo sapiens
atgttggcagtggt

SEQ ID NO: 4716 - DNA, 16 bp, Homo sapiens
gtttttgcagctacta

SEQ ID NO: 4717 - DNA, 15 bp, Homo sapiens
agggcacagacttcc

SEQ ID NO: 4718 - DNA, 16 bp, Homo sapiens
tctttcagcttgacga

SEQ ID NO: 4719 - DNA, 16 bp, Homo sapiens
ggcaagaggattatta

SEQ ID NO: 4720 - DNA, 16 bp, Homo sapiens
cagggattttaggagg

SEQ ID NO: 4721 - DNA, 16 bp, Homo sapiens
gcgcatagaggcactg

SEQ ID NO: 4722 - DNA, 16 bp, Homo sapiens
ttgccatatgcagctg

SEQ ID NO: 4723 - DNA, 16 bp, Homo sapiens
ccggctcggcctcacg

SEQ ID NO: 4724 - DNA, 17 bp, Homo sapiens
gcaaaccactttgggat

SEQ ID NO: 4725 - DNA, 16 bp, Homo sapiens
cctaaccgagccttgc

SEQ ID NO: 4726 - DNA, 16 bp, Homo sapiens
caacagccacaggatc

SEQ ID NO: 4727 - DNA, 18 bp, Homo sapiens
ccggctgaagttcccagg

SEQ ID NO: 4728 - DNA, 25 bp, Homo sapiens
gcttttcttttagttgctgctcttt

SEQ ID NO: 4729 - DNA, 16 bp, Homo sapiens
gatacctggatgtggg

SEQ ID NO: 4730 - DNA, 19 bp, Homo sapiens
gctgaattatttcttcccc

SEQ ID NO: 4731 - DNA, 16 bp, Homo sapiens
tggattaatatcggct

SEQ ID NO: 4732 - DNA, 20 bp, Homo sapiens
cggcaaggcctggagaggaa

SEQ ID NO: 4733 - DNA, 16 bp, Homo sapiens
tgaaaggttctaggca

SEQ ID NO: 4734 - DNA, 20 bp, Homo sapiens
aggtttctgctgccttgtat

SEQ ID NO: 4735 - DNA, 20 bp, Homo sapiens
ttcagcacgcacacggcctt

SEQ ID NO: 4736 - DNA, 16 bp, Homo sapiens
agggaaagaagtgcta

SEQ ID NO: 4737 - DNA, 16 bp, Homo sapiens
ttcaagcaaatcacac

SEQ ID NO: 4738 - DNA, 20 bp, Homo sapiens
gcacacggccttcgtcgcca

SEQ ID NO: 4739 - DNA, 16 bp, Homo sapiens
ggctgatgaactgcag

SEQ ID NO: 4740 - DNA, 18 bp, Homo sapiens
catttctcctcctcatca

SEQ ID NO: 4741 - DNA, 16 bp, Homo sapiens
atctatctcagacatc

SEQ ID NO: 4742 - DNA, 16 bp, Homo sapiens
taaattgtcatcacca

SEQ ID NO: 4743 - DNA, 16 bp, Homo sapiens
ggacagtccatccaga

SEQ ID NO: 4744 - DNA, 16 bp, Homo sapiens
ctaacggcaggcagcc

SEQ ID NO: 4745 - DNA, 12 bp, Homo sapiens
tcattacaccag

SEQ ID NO: 4746 - DNA, 16 bp, Homo sapiens
gatcatgtccttgatc

SEQ ID NO: 4747 - DNA, 18 bp, Homo sapiens
ttaaatttggcggtgtca

SEQ ID NO: 4748 - DNA, 16 bp, Homo sapiens
ttccacttcaagaacc

SEQ ID NO: 4749 - DNA, 16 bp, Homo sapiens
gaaggtgttctcctgg

SEQ ID NO: 4750 - DNA, 21 bp, Homo sapiens
ctgcttgatgatcatctcgtt

SEQ ID NO: 4751 - DNA, 16 bp, Homo sapiens
gccagagtcaccatca

SEQ ID NO: 4752 - DNA, 20 bp, Homo sapiens
cctcacagtcatatctggtc

SEQ ID NO: 4753 - DNA, 16 bp, Homo sapiens
ggctttggttttgcgg

SEQ ID NO: 4754 - DNA, 16 bp, Homo sapiens
tggaatggttactctc

SEQ ID NO: 4755 - DNA, 18 bp, Homo sapiens
tcttgaagtaaacggttt

SEQ ID NO: 4756 - DNA, 16 bp, Homo sapiens
ggtatctgaaagtcac

SEQ ID NO: 4757 - DNA, 25 bp, Homo sapiens
caagcttggctctggcctgtcctaa

SEQ ID NO: 4758 - DNA, 16 bp, Homo sapiens
agcaatctagcctccc

SEQ ID NO: 4759 - DNA, 16 bp, Homo sapiens
gcgccctgcgctcctc

SEQ ID NO: 4760 - DNA, 18 bp, Homo sapiens
ttatcttcacaagtgcca

SEQ ID NO: 4761 - DNA, 16 bp, Homo sapiens
tgacatattatgaatc

SEQ ID NO: 4762 - DNA, 16 bp, Homo sapiens
cgggaaaaccccgcct

SEQ ID NO: 4763 - DNA, 16 bp, Homo sapiens
ggccagagtcctgact

SEQ ID NO: 4764 - DNA, 20 bp, Homo sapiens
cactgtttttaattcatcag

SEQ ID NO: 4765 - DNA, 20 bp, Homo sapiens
ggcctggctcaggtggcctg

SEQ ID NO: 4766 - DNA, 16 bp, Homo sapiens
cacttaatccctattc

SEQ ID NO: 4767 - DNA, 16 bp, Homo sapiens
atcaagctagaaaggt

SEQ ID NO: 4768 - DNA, 16 bp, Homo sapiens
gctatattcacaaggc

SEQ ID NO: 4769 - DNA, 16 bp, Homo sapiens
cgtgaggcccccccga

SEQ ID NO: 4770 - DNA, 18 bp, Homo sapiens
ggtccggaacagggcttt

SEQ ID NO: 4771 - DNA, 16 bp, Homo sapiens
ggacagggattttagg

SEQ ID NO: 4772 - DNA, 18 bp, Homo sapiens
tccttctgcttggaacca

SEQ ID NO: 4773 - DNA, 16 bp, Homo sapiens
gctaatagctattcaa

SEQ ID NO: 4774 - DNA, 16 bp, Homo sapiens
acacacttcaaactcg

SEQ ID NO: 4775 - DNA, 16 bp, Homo sapiens
aacactattggcacac

SEQ ID NO: 4776 - DNA, 16 bp, Homo sapiens
ggctgtgtggttaata

SEQ ID NO: 4777 - DNA, 12 bp, Homo sapiens
acaccatctccc

SEQ ID NO: 4778 - DNA, 16 bp, Homo sapiens
tgcacggatgtccttc

SEQ ID NO: 4779 - DNA, 16 bp, Homo sapiens
gatgcaatgtccagtc

SEQ ID NO: 4780 - DNA, 16 bp, Homo sapiens
ggcaaacacgctctgg

SEQ ID NO: 4781 - DNA, 18 bp, Homo sapiens
cataatgaaaacgccgcc

SEQ ID NO: 4782 - DNA, 18 bp, Homo sapiens
gctgctgtgtgcctgcca

SEQ ID NO: 4783 - DNA, 18 bp, Homo sapiens
ggccagcgccaaacacga

SEQ ID NO: 4784 - DNA, 16 bp, Homo sapiens
agaaattactcttgcg

SEQ ID NO: 4785 - DNA, 20 bp, Homo sapiens
ctttcttcatttccaccttt

SEQ ID NO: 4786 - DNA, 16 bp, Homo sapiens
gcacaacctgctctat

SEQ ID NO: 4787 - DNA, 14 bp, Homo sapiens
caggttgtgcaggt

SEQ ID NO: 4788 - DNA, 16 bp, Homo sapiens
gcaaatccattgccca

SEQ ID NO: 4789 - DNA, 16 bp, Homo sapiens
cactaggccctgccag

SEQ ID NO: 4790 - DNA, 16 bp, Homo sapiens
ggctgatgttgttgat

SEQ ID NO: 4791 - DNA, 16 bp, Homo sapiens
cagaattgttacaacc

SEQ ID NO: 4792 - DNA, 16 bp, Homo sapiens
actgaagctcctgcgc

SEQ ID NO: 4793 - DNA, 19 bp, Homo sapiens
ctgtagcttcaccctttcc

SEQ ID NO: 4794 - DNA, 14 bp, Homo sapiens
tattgctctgcaaa

SEQ ID NO: 4795 - DNA, 16 bp, Homo sapiens
gtaatagtagcagcac

SEQ ID NO: 4796 - DNA, 16 bp, Homo sapiens
gcaaagaagtagggca

SEQ ID NO: 4797 - DNA, 16 bp, Homo sapiens
tgtattacctacggca

SEQ ID NO: 4798 - DNA, 16 bp, Homo sapiens
tggcacgggaagcaac

SEQ ID NO: 4799 - DNA, 16 bp, Homo sapiens
agggatggctcggctg

SEQ ID NO: 4800 - DNA, 16 bp, Homo sapiens
ccctcgaggcctagtc

SEQ ID NO: 4801 - DNA, 16 bp, Homo sapiens
cagtagaaggatctga

SEQ ID NO: 4802 - DNA, 21 bp, Homo sapiens
gataggtggtatcaacatctg

SEQ ID NO: 4803 - DNA, 16 bp, Homo sapiens
agagacaaggtagcaa

SEQ ID NO: 4804 - DNA, 16 bp, Homo sapiens
cctggataaccaggtc

SEQ ID NO: 4805 - DNA, 20 bp, Homo sapiens
ttcatcctcatgaagaagtc

SEQ ID NO: 4806 - DNA, 16 bp, Homo sapiens
tgccactcacaactgg

SEQ ID NO: 4807 - DNA, 16 bp, Homo sapiens
gacgacctgctttttc

SEQ ID NO: 4808 - DNA, 20 bp, Homo sapiens
gaggtcctggttccgaggac

SEQ ID NO: 4809 - DNA, 14 bp, Homo sapiens
ggtgcaggtccagt

SEQ ID NO: 4810 - DNA, 16 bp, Homo sapiens
tagtataccaaggtta

SEQ ID NO: 4811 - DNA, 16 bp, Homo sapiens
gcaaaatcgggttatc

SEQ ID NO: 4812 - DNA, 14 bp, Homo sapiens
acctcttgaacact

SEQ ID NO: 4813 - DNA, 20 bp, Homo sapiens
aagctctgagtaattcttca

SEQ ID NO: 4814 - DNA, 12 bp, Homo sapiens
cctggcatgacc

SEQ ID NO: 4815 - DNA, 16 bp, Homo sapiens
ggtgaagagccccgtc

SEQ ID NO: 4816 - DNA, 16 bp, Homo sapiens
aggattggtgccgccc

SEQ ID NO: 4817 - DNA, 16 bp, Homo sapiens
tctcagtatgtatact

SEQ ID NO: 4818 - DNA, 16 bp, Homo sapiens
agccacatctgctata

SEQ ID NO: 4819 - DNA, 16 bp, Homo sapiens
ctaatgggaagttgat

SEQ ID NO: 4820 - DNA, 16 bp, Homo sapiens
cagctagctcgcccgc

SEQ ID NO: 4821 - DNA, 16 bp, Homo sapiens
tgttacttatccatca

SEQ ID NO: 4822 - DNA, 16 bp, Homo sapiens
attcaggatggtgtca

SEQ ID NO: 4823 - DNA, 16 bp, Homo sapiens
atctaccccagaccca

SEQ ID NO: 4824 - DNA, 16 bp, Homo sapiens
tgcaatggacgcagga

SEQ ID NO: 4825 - DNA, 14 bp, Homo sapiens
gtacatcacctgga

SEQ ID NO: 4826 - DNA, 14 bp, Homo sapiens
aaatttggcggtgt

SEQ ID NO: 4827 - DNA, 16 bp, Homo sapiens
cgccagctcggaggaa

SEQ ID NO: 4828 - DNA, 16 bp, Homo sapiens
cactaaactaatgaca

SEQ ID NO: 4829 - DNA, 16 bp, Homo sapiens
cacaataagggcttaa

SEQ ID NO: 4830 - DNA, 16 bp, Homo sapiens
gtaggaactgagctta

SEQ ID NO: 4831 - DNA, 16 bp, Homo sapiens
gcttctcggcacactt

SEQ ID NO: 4832 - DNA, 16 bp, Homo sapiens
cgacacatttcagaca

SEQ ID NO: 4833 - DNA, 18 bp, Homo sapiens
ccgggtccctggatgtgc

SEQ ID NO: 4834 - DNA, 16 bp, Homo sapiens
gtataccaaggttaat

SEQ ID NO: 4835 - DNA, 16 bp, Homo sapiens
ccgcaatgtgttcatt

SEQ ID NO: 4836 - DNA, 16 bp, Homo sapiens
ctgtgtggttaatatg

SEQ ID NO: 4837 - DNA, 16 bp, Homo sapiens
ccatacccccatctga

SEQ ID NO: 4838 - DNA, 16 bp, Homo sapiens
acagataacagtggcg

SEQ ID NO: 4839 - DNA, 16 bp, Homo sapiens
atcaaacgagtatatt

SEQ ID NO: 4840 - DNA, 16 bp, Homo sapiens
tgcaatgctgccaggc

SEQ ID NO: 4841 - DNA, 16 bp, Homo sapiens
ggccgggaaggactat

SEQ ID NO: 4842 - DNA, 16 bp, Homo sapiens
aacaaagtgacatagc

SEQ ID NO: 4843 - DNA, 16 bp, Homo sapiens
tcacagtggacaccag

SEQ ID NO: 4844 - DNA, 20 bp, Homo sapiens
gggcctgagcagaagttggc

SEQ ID NO: 4845 - DNA, 16 bp, Homo sapiens
gcctaactgtattgat

SEQ ID NO: 4846 - DNA, 16 bp, Homo sapiens
gtgaagagccccgtcc

SEQ ID NO: 4847 - DNA, 16 bp, Homo sapiens
ccccgtagctcttcag

SEQ ID NO: 4848 - DNA, 16 bp, Homo sapiens
tatatatgtggaggca

SEQ ID NO: 4849 - DNA, 16 bp, Homo sapiens
gacagggattttagga

SEQ ID NO: 4850 - DNA, 25 bp, Homo sapiens
ccaattctcaggaatttgtgtcttt

SEQ ID NO: 4851 - DNA, 16 bp, Homo sapiens
ggcgagacagagtaag

SEQ ID NO: 4852 - DNA, 16 bp, Homo sapiens
ccttaagttttttggt

SEQ ID NO: 4853 - DNA, 16 bp, Homo sapiens
tgacgattcctgaacc

SEQ ID NO: 4854 - DNA, 16 bp, Homo sapiens
aatgtccagtcctaag

SEQ ID NO: 4855 - DNA, 16 bp, Homo sapiens
ggtatatgaggaaaca

SEQ ID NO: 4856 - DNA, 20 bp, Homo sapiens
tcagcttctgttagccactg

SEQ ID NO: 4857 - DNA, 22 bp, Homo sapiens
attctttcaactagaataaaag

SEQ ID NO: 4858 - DNA, 16 bp, Homo sapiens
gcacacaacacttccc

SEQ ID NO: 4859 - DNA, 14 bp, Homo sapiens
ctacctgaggattt

SEQ ID NO: 4860 - DNA, 16 bp, Homo sapiens
cacttacagtggtcaa

SEQ ID NO: 4861 - DNA, 16 bp, Homo sapiens
taccaccctcagctta

SEQ ID NO: 4862 - DNA, 14 bp, Homo sapiens
taacttcagtgtct

SEQ ID NO: 4863 - DNA, 16 bp, Homo sapiens
ggtgggtaaaatgtgc

SEQ ID NO: 4864 - DNA, 16 bp, Homo sapiens
ggctagggtgcacagt

SEQ ID NO: 4865 - DNA, 12 bp, Homo sapiens
tgtcaaaaccct

SEQ ID NO: 4866 - DNA, 18 bp, Homo sapiens
tctaaagatctgggaata

SEQ ID NO: 4867 - DNA, 16 bp, Homo sapiens
ggcgacacccgacccg

SEQ ID NO: 4868 - DNA, 15 bp, Homo sapiens
taaattgtcatcacc

SEQ ID NO: 4869 - DNA, 16 bp, Homo sapiens
cagcagttgacgcggg

SEQ ID NO: 4870 - DNA, 16 bp, Homo sapiens
agccaagagtcaagtt

SEQ ID NO: 4871 - DNA, 16 bp, Homo sapiens
gaatagggcaaggccg

SEQ ID NO: 4872 - DNA, 16 bp, Homo sapiens
caagtaaatgtatctg

SEQ ID NO: 4873 - DNA, 16 bp, Homo sapiens
gcatgccagctggctc

SEQ ID NO: 4874 - DNA, 16 bp, Homo sapiens
ctatattcaacaggct

SEQ ID NO: 4875 - DNA, 16 bp, Homo sapiens
ccttgatctggtactc

SEQ ID NO: 4876 - DNA, 16 bp, Homo sapiens
ggagaagaagtgagcc

SEQ ID NO: 4877 - DNA, 23 bp, Homo sapiens
attctcaggaatttgtgtctttc

SEQ ID NO: 4878 - DNA, 16 bp, Homo sapiens
taagtatgcgctgcca

SEQ ID NO: 4879 - DNA, 16 bp, Homo sapiens
gcagtgcggtgtccag

SEQ ID NO: 4880 - DNA, 20 bp, Homo sapiens
catacagtctcaggacactg

SEQ ID NO: 4881 - DNA, 16 bp, Homo sapiens
gtagaaggatctgact

SEQ ID NO: 4882 - DNA, 20 bp, Homo sapiens
acttgtcctttagtaaacat

SEQ ID NO: 4883 - DNA, 16 bp, Homo sapiens
agagatacatcaaccc

SEQ ID NO: 4884 - DNA, 16 bp, Homo sapiens
gcctagggtgcctggc

SEQ ID NO: 4885 - DNA, 14 bp, Homo sapiens
gcccagcaggttgt

SEQ ID NO: 4886 - DNA, 16 bp, Homo sapiens
aagggaaagaagtgct

SEQ ID NO: 4887 - DNA, 16 bp, Homo sapiens
tagaaatgagtgggcg

SEQ ID NO: 4888 - DNA, 16 bp, Homo sapiens
ggtgaaaagcccggtc

SEQ ID NO: 4889 - DNA, 20 bp, Homo sapiens
aatttgatttccatcacctc

SEQ ID NO: 4890 - DNA, 16 bp, Homo sapiens
ttacagggtggtcagc

SEQ ID NO: 4891 - DNA, 16 bp, Homo sapiens
gaagatggcgaagacg

SEQ ID NO: 4892 - DNA, 16 bp, Homo sapiens
cacaaaacgggagcag

SEQ ID NO: 4893 - DNA, 14 bp, Homo sapiens
tagcttaatgtaac

SEQ ID NO: 4894 - DNA, 20 bp, Homo sapiens
gcaactgatgagcaagctca

SEQ ID NO: 4895 - DNA, 19 bp, Homo sapiens
gaatccatgcaggccttca

SEQ ID NO: 4896 - DNA, 16 bp, Homo sapiens
ctacagctggtgcggt

SEQ ID NO: 4897 - DNA, 16 bp, Homo sapiens
ggcatcacggccgggc

SEQ ID NO: 4898 - DNA, 16 bp, Homo sapiens
attcctgaaccgcggg

SEQ ID NO: 4899 - DNA, 18 bp, Homo sapiens
agtggcgttgagtggcat

SEQ ID NO: 4900 - DNA, 16 bp, Homo sapiens
ggcagacccgcagtca

SEQ ID NO: 4901 - DNA, 16 bp, Homo sapiens
tcgagtaggtcaccct

SEQ ID NO: 4902 - DNA, 16 bp, Homo sapiens
gggtttaataatgtgc

SEQ ID NO: 4903 - DNA, 16 bp, Homo sapiens
gttagctggactcaca

SEQ ID NO: 4904 - DNA, 16 bp, Homo sapiens
gcagagagagtccatt

SEQ ID NO: 4905 - DNA, 16 bp, Homo sapiens
gtgctaaccgtgtgtg

SEQ ID NO: 4906 - DNA, 14 bp, Homo sapiens
gaatacttcaaatc

SEQ ID NO: 4907 - DNA, 16 bp, Homo sapiens
agaaactggccggccc

SEQ ID NO: 4908 - DNA, 20 bp, Homo sapiens
acagggattcagtctggtcc

SEQ ID NO: 4909 - DNA, 20 bp, Homo sapiens
tcggccacaccatctttgtc

SEQ ID NO: 4910 - DNA, 20 bp, Homo sapiens
cgctttctctgagcattctg

SEQ ID NO: 4911 - DNA, 16 bp, Homo sapiens
cttaattaagctctgg

SEQ ID NO: 4912 - DNA, 18 bp, Homo sapiens
ctgccttttctgcccatt

SEQ ID NO: 4913 - DNA, 16 bp, Homo sapiens
tcataagggtgagcct

SEQ ID NO: 4914 - DNA, 16 bp, Homo sapiens
agtgaacgagtccctc

SEQ ID NO: 4915 - DNA, 16 bp, Homo sapiens
agcaatggtagagggc

SEQ ID NO: 4916 - DNA, 16 bp, Homo sapiens
tttccttgagtagtag

SEQ ID NO: 4917 - DNA, 16 bp, Homo sapiens
ggtactgaggctgtgg

SEQ ID NO: 4918 - DNA, 18 bp, Homo sapiens
cctgagttgtcactgggt

SEQ ID NO: 4919 - DNA, 14 bp, Homo sapiens
gcacgctctatact

SEQ ID NO: 4920 - DNA, 16 bp, Homo sapiens
gctggcaaccaaggtc

SEQ ID NO: 4921 - DNA, 16 bp, Homo sapiens
aggcatagcactaaac

SEQ ID NO: 4922 - DNA, 16 bp, Homo sapiens
ctccatggatgttctt

SEQ ID NO: 4923 - DNA, 16 bp, Homo sapiens
tcacatgccagacttt

SEQ ID NO: 4924 - DNA, 16 bp, Homo sapiens
ggcaaggtggctaaaa

SEQ ID NO: 4925 - DNA, 20 bp, Homo sapiens
aatgaacacagggtcttgga

SEQ ID NO: 4926 - DNA, 16 bp, Homo sapiens
tactgtacagctgtgc

SEQ ID NO: 4927 - DNA, 16 bp, Homo sapiens
gattagcctgccaggc

SEQ ID NO: 4928 - DNA, 18 bp, Homo sapiens
tgaagaatgtatttaccc

SEQ ID NO: 4929 - DNA, 16 bp, Homo sapiens
gactgctcaatgtcga

SEQ ID NO: 4930 - DNA, 16 bp, Homo sapiens
tcaagggttctggtcc

SEQ ID NO: 4931 - DNA, 16 bp, Homo sapiens
caaggccggcccgggc

SEQ ID NO: 4932 - DNA, 16 bp, Homo sapiens
agaatgaattctggtc

SEQ ID NO: 4933 - DNA, 16 bp, Homo sapiens
gggcaagctactctct

SEQ ID NO: 4934 - DNA, 16 bp, Homo sapiens
cgggaacaggaatcag

SEQ ID NO: 4935 - DNA, 16 bp, Homo sapiens
gcatagagtagggctg

SEQ ID NO: 4936 - DNA, 16 bp, Homo sapiens
ctaatatagagagctt

SEQ ID NO: 4937 - DNA, 14 bp, Homo sapiens
atggggcaacttca

SEQ ID NO: 4938 - DNA, 16 bp, Homo sapiens
ggccagctggactttt

SEQ ID NO: 4939 - DNA, 16 bp, Homo sapiens
aaatacaccctagatg

SEQ ID NO: 4940 - DNA, 16 bp, Homo sapiens
cactgataggcactcc

SEQ ID NO: 4941 - DNA, 16 bp, Homo sapiens
tagatatctagatggc

SEQ ID NO: 4942 - DNA, 20 bp, Homo sapiens
ccaccctttcttctgcgttc

SEQ ID NO: 4943 - DNA, 16 bp, Homo sapiens
ggacttgcagtgcaaa

SEQ ID NO: 4944 - DNA, 16 bp, Homo sapiens
ccccaaagtgcaacac

SEQ ID NO: 4945 - DNA, 16 bp, Homo sapiens
aaatttagaggacatc

SEQ ID NO: 4946 - DNA, 16 bp, Homo sapiens
agagtgcaggcactta

SEQ ID NO: 4947 - DNA, 16 bp, Homo sapiens
tcgaattttcagagta

SEQ ID NO: 4948 - DNA, 16 bp, Homo sapiens
aaggaggtgttaccca

SEQ ID NO: 4949 - DNA, 16 bp, Homo sapiens
gcctagcaaaggcacc

SEQ ID NO: 4950 - DNA, 20 bp, Homo sapiens
cacctgcttccaggaacacc

SEQ ID NO: 4951 - DNA, 16 bp, Homo sapiens
aggaactgagcttact

SEQ ID NO: 4952 - DNA, 16 bp, Homo sapiens
gactaccccgacccac

SEQ ID NO: 4953 - DNA, 20 bp, Homo sapiens
atttcctcatggtcacatgg

SEQ ID NO: 4954 - DNA, 16 bp, Homo sapiens
agccagggcccggctt

SEQ ID NO: 4955 - DNA, 16 bp, Homo sapiens
caatttatctggagga

SEQ ID NO: 4956 - DNA, 16 bp, Homo sapiens
gactccatggatgttc

SEQ ID NO: 4957 - DNA, 16 bp, Homo sapiens
tacttaggttactcct

SEQ ID NO: 4958 - DNA, 16 bp, Homo sapiens
tcatgtccatgacacc

SEQ ID NO: 4959 - DNA, 20 bp, Homo sapiens
aataataccactcacaacgt

SEQ ID NO: 4960 - DNA, 16 bp, Homo sapiens
gactaagtggatccaa

SEQ ID NO: 4961 - DNA, 20 bp, Homo sapiens
tcgcccttcagcacgcacac

SEQ ID NO: 4962 - DNA, 16 bp, Homo sapiens
tgtattattcccagct

SEQ ID NO: 4963 - DNA, 16 bp, Homo sapiens
ccgtatatgtctccga

SEQ ID NO: 4964 - DNA, 16 bp, Homo sapiens
ttccaggactacctct

SEQ ID NO: 4965 - DNA, 16 bp, Homo sapiens
gtatttcaaagtagtc

SEQ ID NO: 4966 - DNA, 16 bp, Homo sapiens
cggcaaaagaagctgg

SEQ ID NO: 4967 - DNA, 16 bp, Homo sapiens
ctccagagtgtccacc

SEQ ID NO: 4968 - DNA, 14 bp, Homo sapiens
ggccctctagctgt

SEQ ID NO: 4969 - DNA, 16 bp, Homo sapiens
agctacagcagctatg

SEQ ID NO: 4970 - DNA, 16 bp, Homo sapiens
gatcacccgccactgt

SEQ ID NO: 4971 - DNA, 16 bp, Homo sapiens
agaggaatagggcaag

SEQ ID NO: 4972 - DNA, 16 bp, Homo sapiens
cggaggaacgaggcct

SEQ ID NO: 4973 - DNA, 12 bp, Homo sapiens
cagagaaggtct

SEQ ID NO: 4974 - DNA, 16 bp, Homo sapiens
tattagagtggcagcc

SEQ ID NO: 4975 - DNA, 16 bp, Homo sapiens
ttctcggcacactttt

SEQ ID NO: 4976 - DNA, 16 bp, Homo sapiens
tccgattttgcttcta

SEQ ID NO: 4977 - DNA, 12 bp, Homo sapiens
atcctcttgata

SEQ ID NO: 4978 - DNA, 16 bp, Homo sapiens
acaagtcattgccaga

SEQ ID NO: 4979 - DNA, 16 bp, Homo sapiens
ttatagaaggcctgcc

SEQ ID NO: 4980 - DNA, 16 bp, Homo sapiens
gaactgagcttactgg

SEQ ID NO: 4981 - DNA, 20 bp, Homo sapiens
gctgaaaggtgtgacatgga

SEQ ID NO: 4982 - DNA, 16 bp, Homo sapiens
aatggtgggccggctg

SEQ ID NO: 4983 - DNA, 16 bp, Homo sapiens
ccgcaggtttctgtgg

SEQ ID NO: 4984 - DNA, 16 bp, Homo sapiens
ttccagcctccgtcat

SEQ ID NO: 4985 - DNA, 25 bp, Homo sapiens
aactgttgcctccggttctgaaggt

SEQ ID NO: 4986 - DNA, 20 bp, Homo sapiens
tcaaagcgacagataacacg

SEQ ID NO: 4987 - DNA, 16 bp, Homo sapiens
gacaagaggcagcatc

SEQ ID NO: 4988 - DNA, 16 bp, Homo sapiens
tgtaggactgctcaat

SEQ ID NO: 4989 - DNA, 18 bp, Homo sapiens
cctaagcccctggtgaca

SEQ ID NO: 4990 - DNA, 16 bp, Homo sapiens
actcaggcacaaccac

SEQ ID NO: 4991 - DNA, 16 bp, Homo sapiens
gagttgatagtcggtt

SEQ ID NO: 4992 - DNA, 16 bp, Homo sapiens
gccagaatgaggctgc

SEQ ID NO: 4993 - DNA, 18 bp, Homo sapiens
acattcataatgacagca

SEQ ID NO: 4994 - DNA, 20 bp, Homo sapiens
gaataggaagttactcttct

SEQ ID NO: 4995 - DNA, 12 bp, Homo sapiens
tgtgaagagagt

SEQ ID NO: 4996 - DNA, 16 bp, Homo sapiens
acagggattttaggag

SEQ ID NO: 4997 - DNA, 16 bp, Homo sapiens
gggcaccccgcaggtt

SEQ ID NO: 4998 - DNA, 16 bp, Homo sapiens
atagaatacagagtgc

SEQ ID NO: 4999 - DNA, 16 bp, Homo sapiens
aggactgctcaatgtc

SEQ ID NO: 5000 - DNA, 16 bp, Homo sapiens
acacaataagggctta

SEQ ID NO: 5001 - DNA, 18 bp, Homo sapiens
aagggcttcctgggtctg

SEQ ID NO: 5002 - DNA, 20 bp, Homo sapiens
gtcagctgtggtaatccact

SEQ ID NO: 5003 - DNA, 16 bp, Homo sapiens
taccaggatctccccc

SEQ ID NO: 5004 - DNA, 16 bp, Homo sapiens
ggtttataaagcttcc

SEQ ID NO: 5005 - DNA, 16 bp, Homo sapiens
agtcagcggagactga

SEQ ID NO: 5006 - DNA, 16 bp, Homo sapiens
agccagggaccgcaat

SEQ ID NO: 5007 - DNA, 20 bp, Homo sapiens
ttgaatgacaaagaaattct

SEQ ID NO: 5008 - DNA, 16 bp, Homo sapiens
tttatagtctccaacg

SEQ ID NO: 5009 - DNA, 20 bp, Homo sapiens
ccctggatcatgtcgaattt

SEQ ID NO: 5010 - DNA, 16 bp, Homo sapiens
gggattttaggaggtg

SEQ ID NO: 5011 - DNA, 20 bp, Homo sapiens
ttgatgtggccgaagtccaa

SEQ ID NO: 5012 - DNA, 16 bp, Homo sapiens
tgcaacaccccagcgc

SEQ ID NO: 5013 - DNA, 16 bp, Homo sapiens
ggctatagggctgata

SEQ ID NO: 5014 - DNA, 14 bp, Homo sapiens
ctagcctctggatt

SEQ ID NO: 5015 - DNA, 12 bp, Homo sapiens
gcatgagcttca

SEQ ID NO: 5016 - DNA, 16 bp, Homo sapiens
tttaaggactccacct

SEQ ID NO: 5017 - DNA, 16 bp, Homo sapiens
gtggtcaaactgagcg

SEQ ID NO: 5018 - DNA, 16 bp, Homo sapiens
ggagagggaccatttt

SEQ ID NO: 5019 - DNA, 16 bp, Homo sapiens
gctgggatatacgccc

SEQ ID NO: 5020 - DNA, 20 bp, Homo sapiens
caactttggtgaatagctga

SEQ ID NO: 5021 - DNA, 16 bp, Homo sapiens
atgctggagccagtgc

SEQ ID NO: 5022 - DNA, 16 bp, Homo sapiens
gccagctcggaggaac

SEQ ID NO: 5023 - DNA, 16 bp, Homo sapiens
tggcatcacctgactt

SEQ ID NO: 5024 - DNA, 16 bp, Homo sapiens
agctgtagggctggct

SEQ ID NO: 5025 - DNA, 15 bp, Homo sapiens
ccaagcaattttgat

SEQ ID NO: 5026 - DNA, 16 bp, Homo sapiens
gcctaggatttataga

SEQ ID NO: 5027 - DNA, 16 bp, Homo sapiens
tatcaaacgagtatat

SEQ ID NO: 5028 - DNA, 16 bp, Homo sapiens
cccctttgcgcagtgc

SEQ ID NO: 5029 - DNA, 16 bp, Homo sapiens
gtgcatcaattttcac

SEQ ID NO: 5030 - DNA, 16 bp, Homo sapiens
gctaccaaggcacaga

SEQ ID NO: 5031 - DNA, 16 bp, Homo sapiens
ttggacttgcagtgca

SEQ ID NO: 5032 - DNA, 20 bp, Homo sapiens
ggtacatttgcgctcagtgg

SEQ ID NO: 5033 - DNA, 14 bp, Homo sapiens
ataggaagcataaa

SEQ ID NO: 5034 - DNA, 16 bp, Homo sapiens
tttcaccgtcccatca

SEQ ID NO: 5035 - DNA, 16 bp, Homo sapiens
cacgaagctaggaggc

SEQ ID NO: 5036 - DNA, 20 bp, Homo sapiens
tttgtgtctttctgagaaac

SEQ ID NO: 5037 - DNA, 16 bp, Homo sapiens
gcctaagttaattcag

SEQ ID NO: 5038 - DNA, 16 bp, Homo sapiens
cgcaaaaataaatcat

SEQ ID NO: 5039 - DNA, 16 bp, Homo sapiens
gtcaagctgagccagt

SEQ ID NO: 5040 - DNA, 20 bp, Homo sapiens
ccaggcttctaaaattagat

SEQ ID NO: 5041 - DNA, 20 bp, Homo sapiens
aggccttcagtcagtccttt

SEQ ID NO: 5042 - DNA, 20 bp, Homo sapiens
taatagcgacaaagtgcata

SEQ ID NO: 5043 - DNA, 16 bp, Homo sapiens
gtcgcccttcagcacg

SEQ ID NO: 5044 - DNA, 16 bp, Homo sapiens
attactattcgacaga

SEQ ID NO: 5045 - DNA, 16 bp, Homo sapiens
ggctttgggaaacctc

SEQ ID NO: 5046 - DNA, 16 bp, Homo sapiens
cggataatggtgggcc

SEQ ID NO: 5047 - DNA, 16 bp, Homo sapiens
aactgctgctccgata

SEQ ID NO: 5048 - DNA, 14 bp, Homo sapiens
tgtgtgtcttcacc

SEQ ID NO: 5049 - DNA, 14 bp, Homo sapiens
ggtcatgcacaggc

SEQ ID NO: 5050 - DNA, 16 bp, Homo sapiens
cccaagcatttccagc

SEQ ID NO: 5051 - DNA, 20 bp, Homo sapiens
tgaccgtcccctgggtctcc

SEQ ID NO: 5052 - DNA, 16 bp, Homo sapiens
aggcacacggctcagg

SEQ ID NO: 5053 - DNA, 12 bp, Homo sapiens
accaatatgctc

SEQ ID NO: 5054 - DNA, 16 bp, Homo sapiens
tctataggtaccagca

SEQ ID NO: 5055 - DNA, 16 bp, Homo sapiens
gcaaggccggcccggg

SEQ ID NO: 5056 - DNA, 16 bp, Homo sapiens
ccagaagtctcctagg

SEQ ID NO: 5057 - DNA, 17 bp, Homo sapiens
aattgccatcaccagaa

SEQ ID NO: 5058 - DNA, 16 bp, Homo sapiens
taataaggtactgaag

SEQ ID NO: 5059 - DNA, 16 bp, Homo sapiens
caccagcccaggcgcg

SEQ ID NO: 5060 - DNA, 16 bp, Homo sapiens
gtgtggttaatatggc

SEQ ID NO: 5061 - DNA, 16 bp, Homo sapiens
tgttactagacttata

SEQ ID NO: 5062 - DNA, 18 bp, Homo sapiens
ctccacgtccacctcccg

SEQ ID NO: 5063 - DNA, 16 bp, Homo sapiens
gacaatgtagtttcca

SEQ ID NO: 5064 - DNA, 16 bp, Homo sapiens
agggccggcagcgact

SEQ ID NO: 5065 - DNA, 16 bp, Homo sapiens
aagtgtcactaaaacc

SEQ ID NO: 5066 - DNA, 16 bp, Homo sapiens
gtacagagccatgact

SEQ ID NO: 5067 - DNA, 16 bp, Homo sapiens
gagcttactggtacac

SEQ ID NO: 5068 - DNA, 16 bp, Homo sapiens
tgtcagcatgataggg

SEQ ID NO: 5069 - DNA, 16 bp, Homo sapiens
cagaagaatctggtcc

SEQ ID NO: 5070 - DNA, 15 bp, Homo sapiens
cacccacctgctgta

SEQ ID NO: 5071 - DNA, 16 bp, Homo sapiens
gatctaattaccagct

SEQ ID NO: 5072 - DNA, 16 bp, Homo sapiens
ccagaaaaccgtttct

SEQ ID NO: 5073 - DNA, 14 bp, Homo sapiens
gatcagttctcatg

SEQ ID NO: 5074 - DNA, 16 bp, Homo sapiens
gctctgtagtttgcta

SEQ ID NO: 5075 - DNA, 18 bp, Homo sapiens
gcagctcaaggccttttc

SEQ ID NO: 5076 - DNA, 16 bp, Homo sapiens
ttctagcccgtcagcc

SEQ ID NO: 5077 - DNA, 16 bp, Homo sapiens
aaaattggttgagtgc

SEQ ID NO: 5078 - DNA, 20 bp, Homo sapiens
gaggagttacctggaagagc

SEQ ID NO: 5079 - DNA, 16 bp, Homo sapiens
gatcagcagaagaatc

SEQ ID NO: 5080 - DNA, 12 bp, Homo sapiens
cagctggtgaca

SEQ ID NO: 5081 - DNA, 18 bp, Homo sapiens
attgttgctgtgtttctt

SEQ ID NO: 5082 - DNA, 16 bp, Homo sapiens
ggcctaacagtgtcca

SEQ ID NO: 5083 - DNA, 16 bp, Homo sapiens
actaactgggctgttc

SEQ ID NO: 5084 - DNA, 20 bp, Homo sapiens
ctgagtaattcttcaccctg

SEQ ID NO: 5085 - DNA, 16 bp, Homo sapiens
gtacaggaggcacacg

SEQ ID NO: 5086 - DNA, 16 bp, Homo sapiens
gtcgaatgaagatggt

SEQ ID NO: 5087 - DNA, 16 bp, Homo sapiens
cttcaaactcggctct

SEQ ID NO: 5088 - DNA, 16 bp, Homo sapiens
gagcataaaagcactc

SEQ ID NO: 5089 - DNA, 16 bp, Homo sapiens
tgagaccacgagatca

SEQ ID NO: 5090 - DNA, 16 bp, Homo sapiens
acgcacaacacaactg

SEQ ID NO: 5091 - DNA, 18 bp, Homo sapiens
cgggcgcctcggaagacc

SEQ ID NO: 5092 - DNA, 14 bp, Homo sapiens
gcatgctggacagt

SEQ ID NO: 5093 - DNA, 16 bp, Homo sapiens
gccaagtggacctggc

SEQ ID NO: 5094 - DNA, 20 bp, Homo sapiens
taggccacgccgaggtcctg

SEQ ID NO: 5095 - DNA, 16 bp, Homo sapiens
tacagtggtcaaactg

SEQ ID NO: 5096 - DNA, 16 bp, Homo sapiens
ccgggaaggactatgt

SEQ ID NO: 5097 - DNA, 20 bp, Homo sapiens
cttcaccctgcagtaggttt

SEQ ID NO: 5098 - DNA, 16 bp, Homo sapiens
ccgggaggtcgatgag

SEQ ID NO: 5099 - DNA, 25 bp, Homo sapiens
tgttgcctccggttctgaaggtgtt

SEQ ID NO: 5100 - DNA, 18 bp, Homo sapiens
tcctggatgcccgggtcc

SEQ ID NO: 5101 - DNA, 16 bp, Homo sapiens
tgaaatcagggctccc

SEQ ID NO: 5102 - DNA, 16 bp, Homo sapiens
cacaatcccagatctc

SEQ ID NO: 5103 - DNA, 16 bp, Homo sapiens
agaggctacatggtga

SEQ ID NO: 5104 - DNA, 27 bp, Homo sapiens
cttccactcagagctcagatcttctaa

SEQ ID NO: 5105 - DNA, 16 bp, Homo sapiens
tgtcataacatgttac

SEQ ID NO: 5106 - DNA, 16 bp, Homo sapiens
tgttaccttctcggca

SEQ ID NO: 5107 - DNA, 16 bp, Homo sapiens
ggctaggtggtgtgcg

SEQ ID NO: 5108 - DNA, 16 bp, Homo sapiens
cacaatccactcctgg

SEQ ID NO: 5109 - DNA, 16 bp, Homo sapiens
tggcatgtggttgttg

SEQ ID NO: 5110 - DNA, 16 bp, Homo sapiens
tactattgcatcattt

SEQ ID NO: 5111 - DNA, 16 bp, Homo sapiens
tggcaaccaaggtctg

SEQ ID NO: 5112 - DNA, 16 bp, Homo sapiens
cagagcataggagagg

SEQ ID NO: 5113 - DNA, 16 bp, Homo sapiens
aattagaggacactgg

SEQ ID NO: 5114 - DNA, 16 bp, Homo sapiens
tgtttatgcaccatgt

SEQ ID NO: 5115 - DNA, 18 bp, Homo sapiens
gactccttcacctcatcg

SEQ ID NO: 5116 - DNA, 16 bp, Homo sapiens
cacacagagctgcgca

SEQ ID NO: 5117 - DNA, 16 bp, Homo sapiens
aagggttactttgcca

SEQ ID NO: 5118 - DNA, 20 bp, Homo sapiens
tcctgtggtgacttgtcctt

SEQ ID NO: 5119 - DNA, 16 bp, Homo sapiens
gtcactgttggcaaac

SEQ ID NO: 5120 - DNA, 16 bp, Homo sapiens
tcctattagagtggca

SEQ ID NO: 5121 - DNA, 14 bp, Homo sapiens
tggaagctgctgta

SEQ ID NO: 5122 - DNA, 16 bp, Homo sapiens
gttaatgcttcacctg

SEQ ID NO: 5123 - DNA, 16 bp, Homo sapiens
tttaggaggtgacgga

SEQ ID NO: 5124 - DNA, 16 bp, Homo sapiens
gtccaagtgtaagagc

SEQ ID NO: 5125 - DNA, 16 bp, Homo sapiens
ggcttatgagtccact

SEQ ID NO: 5126 - DNA, 16 bp, Homo sapiens
gagaataaagcctggc

SEQ ID NO: 5127 - DNA, 16 bp, Homo sapiens
ccggcccgggccaacg

SEQ ID NO: 5128 - DNA, 16 bp, Homo sapiens
gggcccggtggccatg

SEQ ID NO: 5129 - DNA, 16 bp, Homo sapiens
agccaggagcaatcgc

SEQ ID NO: 5130 - DNA, 16 bp, Homo sapiens
atgtccatgacacctg

SEQ ID NO: 5131 - DNA, 16 bp, Homo sapiens
ttgattagctcctgga

SEQ ID NO: 5132 - DNA, 18 bp, Homo sapiens
aagccgcgcttgtcctcc

SEQ ID NO: 5133 - DNA, 16 bp, Homo sapiens
acagtggtcaaactga

SEQ ID NO: 5134 - DNA, 16 bp, Homo sapiens
ttctggtctggcttaa

SEQ ID NO: 5135 - DNA, 18 bp, Homo sapiens
ggtcaccttctccacgtc

SEQ ID NO: 5136 - DNA, 16 bp, Homo sapiens
gattaatatcggctga

SEQ ID NO: 5137 - DNA, 16 bp, Homo sapiens
ggtttttgagaggttg

SEQ ID NO: 5138 - DNA, 18 bp, Homo sapiens
tgccatcattcttgagga

SEQ ID NO: 5139 - DNA, 21 bp, Homo sapiens
cctccggttctgaaggtgttc

SEQ ID NO: 5140 - DNA, 14 bp, Homo sapiens
gtgcaggtccagtt

SEQ ID NO: 5141 - DNA, 16 bp, Homo sapiens
ctctttcagcttgacg

SEQ ID NO: 5142 - DNA, 16 bp, Homo sapiens
aagcatgacatgacac

SEQ ID NO: 5143 - DNA, 16 bp, Homo sapiens
agaggttgactacaaa

SEQ ID NO: 5144 - DNA, 16 bp, Homo sapiens
gtccactcccagtagg

SEQ ID NO: 5145 - DNA, 18 bp, Homo sapiens
tgttctgacaacagtttg

SEQ ID NO: 5146 - DNA, 20 bp, Homo sapiens
tctggtccatggagaacacc

SEQ ID NO: 5147 - DNA, 16 bp, Homo sapiens
agcaacatgaaccaca

SEQ ID NO: 5148 - DNA, 16 bp, Homo sapiens
agtggtgacgattcgc

SEQ ID NO: 5149 - DNA, 16 bp, Homo sapiens
cagagagaggccgccc

SEQ ID NO: 5150 - DNA, 16 bp, Homo sapiens
gattagtccatgcatg

SEQ ID NO: 5151 - DNA, 16 bp, Homo sapiens
actgaatcaccagcag

SEQ ID NO: 5152 - DNA, 16 bp, Homo sapiens
agggacttcggctcat

SEQ ID NO: 5153 - DNA, 20 bp, Homo sapiens
taataagtgccatacagggt

SEQ ID NO: 5154 - DNA, 16 bp, Homo sapiens
acatagcccaagccca

SEQ ID NO: 5155 - DNA, 20 bp, Homo sapiens
aaaatgcttgccttgtataa

SEQ ID NO: 5156 - DNA, 16 bp, Homo sapiens
agctatcacacagaag

SEQ ID NO: 5157 - DNA, 16 bp, Homo sapiens
gacagtgactcggcag

SEQ ID NO: 5158 - DNA, 16 bp, Homo sapiens
gaaggaagtcccggcc

SEQ ID NO: 5159 - DNA, 16 bp, Homo sapiens
gtagccgttgctcccc

SEQ ID NO: 5160 - DNA, 16 bp, Homo sapiens
ggatcatgtccttgat

SEQ ID NO: 5161 - DNA, 16 bp, Homo sapiens
ataacatgttactcag

SEQ ID NO: 5162 - DNA, 18 bp, Homo sapiens
gctggtcttgtttttcaa

SEQ ID NO: 5163 - DNA, 18 bp, Homo sapiens
tcgccctgtttccaccca

SEQ ID NO: 5164 - DNA, 16 bp, Homo sapiens
cttcatatgtatgggt

SEQ ID NO: 5165 - DNA, 18 bp, Homo sapiens
agcattccagtggtttta

SEQ ID NO: 5166 - DNA, 16 bp, Homo sapiens
ggtatctgggccatca

SEQ ID NO: 5167 - DNA, 16 bp, Homo sapiens
cacccgacccgagcga

SEQ ID NO: 5168 - DNA, 12 bp, Homo sapiens
tgggttatggtc

SEQ ID NO: 5169 - DNA, 16 bp, Homo sapiens
gacaaaataggatgtg

SEQ ID NO: 5170 - DNA, 18 bp, Homo sapiens
gggaattatcttgaccca

SEQ ID NO: 5171 - DNA, 16 bp, Homo sapiens
ggcccctttgcgcagt

SEQ ID NO: 5172 - DNA, 12 bp, Homo sapiens
ctgcaacatgat

SEQ ID NO: 5173 - DNA, 16 bp, Homo sapiens
caggcagaagacatct

SEQ ID NO: 5174 - DNA, 16 bp, Homo sapiens
ggtgatcacagtccct

SEQ ID NO: 5175 - DNA, 16 bp, Homo sapiens
acatagggccttctgg

SEQ ID NO: 5176 - DNA, 16 bp, Homo sapiens
cacaaagcgatatggg

SEQ ID NO: 5177 - DNA, 14 bp, Homo sapiens
tcgcccttcagcac

SEQ ID NO: 5178 - DNA, 16 bp, Homo sapiens
ctgaatctaggtgtct

SEQ ID NO: 5179 - DNA, 16 bp, Homo sapiens
tgacaaggtaggtttt

SEQ ID NO: 5180 - DNA, 25 bp, Homo sapiens
tccggttctgaaggtgttcttgtac

SEQ ID NO: 5181 - DNA, 12 bp, Homo sapiens
agctacacaacc

SEQ ID NO: 5182 - DNA, 16 bp, Homo sapiens
aaacatcacagggacc

SEQ ID NO: 5183 - DNA, 15 bp, Homo sapiens
ttgctgctcttttcc

SEQ ID NO: 5184 - DNA, 16 bp, Homo sapiens
gagcagagcataggag

SEQ ID NO: 5185 - DNA, 16 bp, Homo sapiens
ataataaccaccgaag

SEQ ID NO: 5186 - DNA, 16 bp, Homo sapiens
gattattacatgagtc

SEQ ID NO: 5187 - DNA, 16 bp, Homo sapiens
gctgcacggatgtcct

SEQ ID NO: 5188 - DNA, 25 bp, Homo sapiens
tgctgatgttttctgacagaaagat

SEQ ID NO: 5189 - DNA, 16 bp, Homo sapiens
aaacttgcagcagtgg

SEQ ID NO: 5190 - DNA, 16 bp, Homo sapiens
atggagggagcagagc

SEQ ID NO: 5191 - DNA, 16 bp, Homo sapiens
cccaaaggatctgccc

SEQ ID NO: 5192 - DNA, 16 bp, Homo sapiens
agataggcctgcttgc

SEQ ID NO: 5193 - DNA, 20 bp, Homo sapiens
tgtgctttgaggacttgcgc

SEQ ID NO: 5194 - DNA, 20 bp, Homo sapiens
tgaggaatgggttcacaaat

SEQ ID NO: 5195 - DNA, 16 bp, Homo sapiens
tcagagagaggccgcc

SEQ ID NO: 5196 - DNA, 16 bp, Homo sapiens
ttttaaagaagacggg

SEQ ID NO: 5197 - DNA, 18 bp, Homo sapiens
gctggacttgtaaaggaa

SEQ ID NO: 5198 - DNA, 16 bp, Homo sapiens
atgctggacaccggtc

SEQ ID NO: 5199 - DNA, 20 bp, Homo sapiens
ggttccgaggactgcaacgg

SEQ ID NO: 5200 - DNA, 16 bp, Homo sapiens
caatagagacacctcc

SEQ ID NO: 5201 - DNA, 16 bp, Homo sapiens
gaacacatgaggaacc

SEQ ID NO: 5202 - DNA, 16 bp, Homo sapiens
tgcgagccggccccag

SEQ ID NO: 5203 - DNA, 18 bp, Homo sapiens
agggctttgctctcctcc

SEQ ID NO: 5204 - DNA, 18 bp, Homo sapiens
agccatgatgaaagttgc

SEQ ID NO: 5205 - DNA, 20 bp, Homo sapiens
ctgggactttgtcttcgtaa

SEQ ID NO: 5206 - DNA, 16 bp, Homo sapiens
ggccatggagggtcac

SEQ ID NO: 5207 - DNA, 16 bp, Homo sapiens
actcacccagtgatgt

SEQ ID NO: 5208 - DNA, 16 bp, Homo sapiens
aagggcacagacttcc

SEQ ID NO: 5209 - DNA, 18 bp, Homo sapiens
aggtcttcccacaggcac

SEQ ID NO: 5210 - DNA, 16 bp, Homo sapiens
cagcaatttcattggc

SEQ ID NO: 5211 - DNA, 16 bp, Homo sapiens
ggacacagcggctgcc

SEQ ID NO: 5212 - DNA, 16 bp, Homo sapiens
tgcgatatcctcccct

SEQ ID NO: 5213 - DNA, 20 bp, Homo sapiens
cccatcaattcggtaattct

SEQ ID NO: 5214 - DNA, 18 bp, Homo sapiens
ggtggtgggcacgcggac

SEQ ID NO: 5215 - DNA, 16 bp, Homo sapiens
tcacacggaagagagg

SEQ ID NO: 5216 - DNA, 15 bp, Homo sapiens
acagctatcttctca

SEQ ID NO: 5217 - DNA, 16 bp, Homo sapiens
caggatctccccctga

SEQ ID NO: 5218 - DNA, 20 bp, Homo sapiens
agggtttttattcacaggct

SEQ ID NO: 5219 - DNA, 16 bp, Homo sapiens
gcctagtcgagcaggg

SEQ ID NO: 5220 - DNA, 31 bp, Homo sapiens
cattcaactgttgcctccggttctgaaggtg

SEQ ID NO: 5221 - DNA, 16 bp, Homo sapiens
tcaaaacggaggtttc

SEQ ID NO: 5222 - DNA, 25 bp, Homo sapiens
acctgctcagcttcttccttagctt

SEQ ID NO: 5223 - DNA, 18 bp, Homo sapiens
ggcatttctagtttggag

SEQ ID NO: 5224 - DNA, 16 bp, Homo sapiens
ccacatgtgaagcagc

SEQ ID NO: 5225 - DNA, 16 bp, Homo sapiens
tgtttaagatttatgc

SEQ ID NO: 5226 - DNA, 16 bp, Homo sapiens
gcccgaatgtgttttg

SEQ ID NO: 5227 - DNA, 16 bp, Homo sapiens
ctctttatatagatgg

SEQ ID NO: 5228 - DNA, 20 bp, Homo sapiens
acacatcggccacaccatct

SEQ ID NO: 5229 - DNA, 12 bp, Homo sapiens
cgatgttgctgg

SEQ ID NO: 5230 - DNA, 16 bp, Homo sapiens
acgagatcaacacact

SEQ ID NO: 5231 - DNA, 14 bp, Homo sapiens
ctctggatcagagt

SEQ ID NO: 5232 - DNA, 16 bp, Homo sapiens
gctgggcggataatgg

SEQ ID NO: 5233 - DNA, 18 bp, Homo sapiens
acagtagtaggatgaaat

SEQ ID NO: 5234 - DNA, 19 bp, Homo sapiens
tactttcttcatttccacc

SEQ ID NO: 5235 - DNA, 16 bp, Homo sapiens
gtgcacccaggctgcc

SEQ ID NO: 5236 - DNA, 16 bp, Homo sapiens
ccgggcctagcaaagg

SEQ ID NO: 5237 - DNA, 14 bp, Homo sapiens
agcctctggatttg

SEQ ID NO: 5238 - DNA, 16 bp, Homo sapiens
cgttctcccctcccgt

SEQ ID NO: 5239 - DNA, 16 bp, Homo sapiens
ctacaggtgtcaccat

SEQ ID NO: 5240 - DNA, 16 bp, Homo sapiens
agctaggttaatttct

SEQ ID NO: 5241 - DNA, 16 bp, Homo sapiens
gaacaacacctaatgt

SEQ ID NO: 5242 - DNA, 14 bp, Homo sapiens
caccagctggatgg

SEQ ID NO: 5243 - DNA, 20 bp, Homo sapiens
gatcatgatgaaaggttact

SEQ ID NO: 5244 - DNA, 16 bp, Homo sapiens
cctttattcagattgt

SEQ ID NO: 5245 - DNA, 16 bp, Homo sapiens
actactagtttctgtt

SEQ ID NO: 5246 - DNA, 18 bp, Homo sapiens
acaatcgctttactgctg

SEQ ID NO: 5247 - DNA, 16 bp, Homo sapiens
gcccaagtccttgtgg

SEQ ID NO: 5248 - DNA, 16 bp, Homo sapiens
tccaatgacagcccag

SEQ ID NO: 5249 - DNA, 16 bp, Homo sapiens
acgaagctaggaggcg

SEQ ID NO: 5250 - DNA, 12 bp, Homo sapiens
attcactttcat

SEQ ID NO: 5251 - DNA, 16 bp, Homo sapiens
agtcatccagctcccg

SEQ ID NO: 5252 - DNA, 16 bp, Homo sapiens
cctaagggttttctgg

SEQ ID NO: 5253 - DNA, 16 bp, Homo sapiens
tgcctaggcgatcctc

SEQ ID NO: 5254 - DNA, 16 bp, Homo sapiens
ccacaatccactcctg

SEQ ID NO: 5255 - DNA, 12 bp, Homo sapiens
tcctatgcaatc

SEQ ID NO: 5256 - DNA, 16 bp, Homo sapiens
aggtcactgttggcaa

SEQ ID NO: 5257 - DNA, 16 bp, Homo sapiens
gcatgataatcccagc

SEQ ID NO: 5258 - DNA, 16 bp, Homo sapiens
tggagatactatcagt

SEQ ID NO: 5259 - DNA, 19 bp, Homo sapiens
ttacacttttaagattaca

SEQ ID NO: 5260 - DNA, 16 bp, Homo sapiens
tgggactgtaagtatg

SEQ ID NO: 5261 - DNA, 20 bp, Homo sapiens
ctttgtctagtgcttccatc

SEQ ID NO: 5262 - DNA, 14 bp, Homo sapiens
caaagatatagttc

SEQ ID NO: 5263 - DNA, 25 bp, Homo sapiens
ttggctctggcctgtcctaagacct

SEQ ID NO: 5264 - DNA, 16 bp, Homo sapiens
gtccagccgcgagtcc

SEQ ID NO: 5265 - DNA, 16 bp, Homo sapiens
tcgaatgacatttcct

SEQ ID NO: 5266 - DNA, 16 bp, Homo sapiens
tcaaatcccatcagga

SEQ ID NO: 5267 - DNA, 20 bp, Homo sapiens
gtggtgcaagtggacagaga

SEQ ID NO: 5268 - DNA, 16 bp, Homo sapiens
atcacggatcttgagg

SEQ ID NO: 5269 - DNA, 16 bp, Homo sapiens
gggacaactggcgaca

SEQ ID NO: 5270 - DNA, 16 bp, Homo sapiens
gtccaggtggcagctc

SEQ ID NO: 5271 - DNA, 16 bp, Homo sapiens
attttaggaggtgacg

SEQ ID NO: 5272 - DNA, 16 bp, Homo sapiens
ccccactgtgctaaac

SEQ ID NO: 5273 - DNA, 16 bp, Homo sapiens
ctacatgggctttccc

SEQ ID NO: 5274 - DNA, 18 bp, Homo sapiens
atctgcttgatgaacgtg

SEQ ID NO: 5275 - DNA, 16 bp, Homo sapiens
gctctggtctgccgag

SEQ ID NO: 5276 - DNA, 16 bp, Homo sapiens
tcgatcagcagaagaa

SEQ ID NO: 5277 - DNA, 16 bp, Homo sapiens
ggtaagggttactttg

SEQ ID NO: 5278 - DNA, 16 bp, Homo sapiens
aagtatgcgctgccat

SEQ ID NO: 5279 - DNA, 16 bp, Homo sapiens
agctaaaatccactat

SEQ ID NO: 5280 - DNA, 16 bp, Homo sapiens
ggcaactggttacaaa

SEQ ID NO: 5281 - DNA, 23 bp, Homo sapiens
ccatttgtatttagcatgttccc

SEQ ID NO: 5282 - DNA, 16 bp, Homo sapiens
cctgctaatgggaagt

SEQ ID NO: 5283 - DNA, 16 bp, Homo sapiens
tgccagctgggcacta

SEQ ID NO: 5284 - DNA, 16 bp, Homo sapiens
gttggcaaacacgctc

SEQ ID NO: 5285 - DNA, 16 bp, Homo sapiens
agcaagatcattgggt

SEQ ID NO: 5286 - DNA, 20 bp, Homo sapiens
acttgatccaaagctctgag

SEQ ID NO: 5287 - DNA, 16 bp, Homo sapiens
aacacaggagcagcat

SEQ ID NO: 5288 - DNA, 16 bp, Homo sapiens
ggccagctggtaggcc

SEQ ID NO: 5289 - DNA, 16 bp, Homo sapiens
tatacgggcatgttga

SEQ ID NO: 5290 - DNA, 16 bp, Homo sapiens
gtacaagggagaagca

SEQ ID NO: 5291 - DNA, 16 bp, Homo sapiens
cggcacacttttttat

SEQ ID NO: 5292 - DNA, 12 bp, Homo sapiens
ttataaaactgg

SEQ ID NO: 5293 - DNA, 16 bp, Homo sapiens
aacctatgtatcaaag

SEQ ID NO: 5294 - DNA, 16 bp, Homo sapiens
caacaaacaacacgct

SEQ ID NO: 5295 - DNA, 16 bp, Homo sapiens
gacatttaacacacta

SEQ ID NO: 5296 - DNA, 16 bp, Homo sapiens
gctctgtctcctctcg

SEQ ID NO: 5297 - DNA, 15 bp, Homo sapiens
cttcctcactgagga

SEQ ID NO: 5298 - DNA, 20 bp, Homo sapiens
ccacctttgcccaagtcatc

SEQ ID NO: 5299 - DNA, 16 bp, Homo sapiens
gaagaggtcactgttg

SEQ ID NO: 5300 - DNA, 16 bp, Homo sapiens
tagtgatatgctgcct

SEQ ID NO: 5301 - DNA, 20 bp, Homo sapiens
ctcatggtcacatggatgag

SEQ ID NO: 5302 - DNA, 16 bp, Homo sapiens
agtcactttaacaagt

SEQ ID NO: 5303 - DNA, 16 bp, Homo sapiens
aatgaattctggtctg

SEQ ID NO: 5304 - DNA, 16 bp, Homo sapiens
ccaaaaatgggctgcc

SEQ ID NO: 5305 - DNA, 16 bp, Homo sapiens
tgtttatttaccgttt

SEQ ID NO: 5306 - DNA, 16 bp, Homo sapiens
gaatatcaacaccttg

SEQ ID NO: 5307 - DNA, 16 bp, Homo sapiens
taggactgctcaatgt

SEQ ID NO: 5308 - DNA, 20 bp, Homo sapiens
attgaaacagacattttaac

SEQ ID NO: 5309 - DNA, 16 bp, Homo sapiens
tgctaaacagtcaatc

SEQ ID NO: 5310 - DNA, 16 bp, Homo sapiens
tcaggaggcgagattg

SEQ ID NO: 5311 - DNA, 16 bp, Homo sapiens
catttaaccatgacag

SEQ ID NO: 5312 - DNA, 16 bp, Homo sapiens
agcagatggcctggta

SEQ ID NO: 5313 - DNA, 16 bp, Homo sapiens
gcacggatgtccttct

SEQ ID NO: 5314 - DNA, 25 bp, Homo sapiens
ttgtgtctttctgagaaactgttca

SEQ ID NO: 5315 - DNA, 16 bp, Homo sapiens
aatatctcagcagtgc

SEQ ID NO: 5316 - DNA, 16 bp, Homo sapiens
ccccaaaggcccttag

SEQ ID NO: 5317 - DNA, 16 bp, Homo sapiens
gacgaggctggccctg

SEQ ID NO: 5318 - DNA, 16 bp, Homo sapiens
ccggacttcatcaaag

SEQ ID NO: 5319 - DNA, 16 bp, Homo sapiens
ctatagaacaggagtg

SEQ ID NO: 5320 - DNA, 16 bp, Homo sapiens
gtccttgatctggtac

SEQ ID NO: 5321 - DNA, 16 bp, Homo sapiens
cgttaaggaagaggcc

SEQ ID NO: 5322 - DNA, 16 bp, Homo sapiens
catcagggtttcaggc

SEQ ID NO: 5323 - DNA, 16 bp, Homo sapiens
caggtcgacacatttc

SEQ ID NO: 5324 - DNA, 18 bp, Homo sapiens
ccatccggttctcgttgt

SEQ ID NO: 5325 - DNA, 21 bp, Homo sapiens
gtctgccgaggagtataggta

SEQ ID NO: 5326 - DNA, 14 bp, Homo sapiens
agcaccaatatgct

SEQ ID NO: 5327 - DNA, 25 bp, Homo sapiens
cttacaggctccaatagtggtcagt

SEQ ID NO: 5328 - DNA, 12 bp, Homo sapiens
gttgttccctct

SEQ ID NO: 5329 - DNA, 16 bp, Homo sapiens
atgaaggctgccactt

SEQ ID NO: 5330 - DNA, 16 bp, Homo sapiens
ggcttaattacagctt

SEQ ID NO: 5331 - DNA, 20 bp, Homo sapiens
tgtgcaattgtggctaccac

SEQ ID NO: 5332 - DNA, 14 bp, Homo sapiens
ttgcaatgtctggc

SEQ ID NO: 5333 - DNA, 19 bp, Homo sapiens
ccaatgatgcaatggtctc

SEQ ID NO: 5334 - DNA, 20 bp, Homo sapiens
taccacgtactgctggcaaa

SEQ ID NO: 5335 - DNA, 12 bp, Homo sapiens
cgtttgggtggc

SEQ ID NO: 5336 - DNA, 16 bp, Homo sapiens
tcaacacacttcaaac

SEQ ID NO: 5337 - DNA, 16 bp, Homo sapiens
ggcacacttttttatg

SEQ ID NO: 5338 - DNA, 20 bp, Homo sapiens
tcctcatggtcgcagggatg

SEQ ID NO: 5339 - DNA, 16 bp, Homo sapiens
ggctagggtcaaaggt

SEQ ID NO: 5340 - DNA, 16 bp, Homo sapiens
aatagaatacagagtg

SEQ ID NO: 5341 - DNA, 16 bp, Homo sapiens
cgaactggccgagatg

SEQ ID NO: 5342 - DNA, 20 bp, Homo sapiens
tcatggtcacatggatgagt

SEQ ID NO: 5343 - DNA, 16 bp, Homo sapiens
tgtattgattagctcc

SEQ ID NO: 5344 - DNA, 18 bp, Homo sapiens
ctcatcgctcaggcaaca

SEQ ID NO: 5345 - DNA, 20 bp, Homo sapiens
cagcccttgccttctgctcg

SEQ ID NO: 5346 - DNA, 16 bp, Homo sapiens
actgggagcctggtcc

SEQ ID NO: 5347 - DNA, 16 bp, Homo sapiens
gtatatatcagctcag

SEQ ID NO: 5348 - DNA, 16 bp, Homo sapiens
acgcacagggcggcct

SEQ ID NO: 5349 - DNA, 16 bp, Homo sapiens
gaaaaacacgaagggc

SEQ ID NO: 5350 - DNA, 16 bp, Homo sapiens
tcctggagttgacatt

SEQ ID NO: 5351 - DNA, 16 bp, Homo sapiens
ggcataggtggactgg

SEQ ID NO: 5352 - DNA, 18 bp, Homo sapiens
tgtttcaagcccattctt

SEQ ID NO: 5353 - DNA, 16 bp, Homo sapiens
gtacagggtggacatt

SEQ ID NO: 5354 - DNA, 30 bp, Homo sapiens
tgttgcctccggttctgaaggtgttcttgt

SEQ ID NO: 5355 - DNA, 16 bp, Homo sapiens
gagcatcaccagccca

SEQ ID NO: 5356 - DNA, 17 bp, Homo sapiens
gcccaatgccatcctgg

SEQ ID NO: 5357 - DNA, 20 bp, Homo sapiens
tgagttttataaaactatac

SEQ ID NO: 5358 - DNA, 16 bp, Homo sapiens
agctaaacagggtttt

SEQ ID NO: 5359 - DNA, 16 bp, Homo sapiens
tgttttggtgctggct

SEQ ID NO: 5360 - DNA, 16 bp, Homo sapiens
ggccacgctcatgacg

SEQ ID NO: 5361 - DNA, 16 bp, Homo sapiens
aacaaaacaggacccg

SEQ ID NO: 5362 - DNA, 14 bp, Homo sapiens
acagtaattgatgt

SEQ ID NO: 5363 - DNA, 16 bp, Homo sapiens
tatacccctgcacccc

SEQ ID NO: 5364 - DNA, 16 bp, Homo sapiens
tttgatactgatctca

SEQ ID NO: 5365 - DNA, 20 bp, Homo sapiens
tgtagcacctgcttccagga

SEQ ID NO: 5366 - DNA, 20 bp, Homo sapiens
atgaaaggttactgccttct

SEQ ID NO: 5367 - DNA, 15 bp, Homo sapiens
aggcaaattaatggt

SEQ ID NO: 5368 - DNA, 16 bp, Homo sapiens
gcacaagcttgaccct

SEQ ID NO: 5369 - DNA, 19 bp, Homo sapiens
ttatcaggatacatttcta

SEQ ID NO: 5370 - DNA, 18 bp, Homo sapiens
gtaggtgctgctgctgct

SEQ ID NO: 5371 - DNA, 16 bp, Homo sapiens
taataagtcacactgg

SEQ ID NO: 5372 - DNA, 18 bp, Homo sapiens
cctccggttctgaaggtg

SEQ ID NO: 5373 - DNA, 16 bp, Homo sapiens
tggttaatatggccgg

SEQ ID NO: 5374 - DNA, 14 bp, Homo sapiens
gtctaagtcgaatc

SEQ ID NO: 5375 - DNA, 16 bp, Homo sapiens
ggccgagatgggatct

SEQ ID NO: 5376 - DNA, 14 bp, Homo sapiens
caaagtcccttagc

SEQ ID NO: 5377 - DNA, 16 bp, Homo sapiens
gactacagtctgttcg

SEQ ID NO: 5378 - DNA, 16 bp, Homo sapiens
tgagaatgggagcaac

SEQ ID NO: 5379 - DNA, 16 bp, Homo sapiens
acataaggatgttgta

SEQ ID NO: 5380 - DNA, 16 bp, Homo sapiens
aatatatatgtggagg

SEQ ID NO: 5381 - DNA, 16 bp, Homo sapiens
cggaaccgctctgtat

SEQ ID NO: 5382 - DNA, 16 bp, Homo sapiens
gcctttacttaagata

SEQ ID NO: 5383 - DNA, 16 bp, Homo sapiens
ggctttgttagatgcc

SEQ ID NO: 5384 - DNA, 16 bp, Homo sapiens
cacggatgtccttctt

SEQ ID NO: 5385 - DNA, 20 bp, Homo sapiens
aggttgtgtcaccagagtaa

SEQ ID NO: 5386 - DNA, 16 bp, Homo sapiens
acccacatagcccaag

SEQ ID NO: 5387 - DNA, 12 bp, Homo sapiens
tcaggttcattg

SEQ ID NO: 5388 - DNA, 16 bp, Homo sapiens
gtgacggaaccgctct

SEQ ID NO: 5389 - DNA, 18 bp, Homo sapiens
cacgtgaagtgtgagtag

SEQ ID NO: 5390 - DNA, 15 bp, Homo sapiens
tcttgaccacctttt

SEQ ID NO: 5391 - DNA, 16 bp, Homo sapiens
taatatggccgggaag

SEQ ID NO: 5392 - DNA, 16 bp, Homo sapiens
gcggaatgtaaattac

SEQ ID NO: 5393 - DNA, 16 bp, Homo sapiens
gaagatggctggacga

SEQ ID NO: 5394 - DNA, 16 bp, Homo sapiens
gaaagagcagtggtgc

SEQ ID NO: 5395 - DNA, 16 bp, Homo sapiens
tgtacctaagtacaga

SEQ ID NO: 5396 - DNA, 16 bp, Homo sapiens
cacagattgaggacaa

SEQ ID NO: 5397 - DNA, 12 bp, Homo sapiens
agggcttccagt

SEQ ID NO: 5398 - DNA, 14 bp, Homo sapiens
ctcagggaaccagg

SEQ ID NO: 5399 - DNA, 20 bp, Homo sapiens
tctccattgggctgaaaggt

SEQ ID NO: 5400 - DNA, 16 bp, Homo sapiens
agtgatatgctgccta

SEQ ID NO: 5401 - DNA, 16 bp, Homo sapiens
tgctgcacggatgtcc

SEQ ID NO: 5402 - DNA, 16 bp, Homo sapiens
tcaaactcggctcttt

SEQ ID NO: 5403 - DNA, 16 bp, Homo sapiens
gatggtccgtaggcct

SEQ ID NO: 5404 - DNA, 16 bp, Homo sapiens
ggccaggcttgccgct

SEQ ID NO: 5405 - DNA, 16 bp, Homo sapiens
caccagggctccgcct

SEQ ID NO: 5406 - DNA, 16 bp, Homo sapiens
agtaatgataaggacc

SEQ ID NO: 5407 - DNA, 14 bp, Homo sapiens
gaaagctccttcca

SEQ ID NO: 5408 - DNA, 20 bp, Homo sapiens
gtcgccataactcgctaggc

SEQ ID NO: 5409 - DNA, 16 bp, Homo sapiens
cattagagtagctaat

SEQ ID NO: 5410 - DNA, 14 bp, Homo sapiens
tggaccgcagccgg

SEQ ID NO: 5411 - DNA, 16 bp, Homo sapiens
caccatcacacacgga

SEQ ID NO: 5412 - DNA, 18 bp, Homo sapiens
ctcgatctcggcgttgat

SEQ ID NO: 5413 - DNA, 16 bp, Homo sapiens
cgagatgggatctgag

SEQ ID NO: 5414 - DNA, 16 bp, Homo sapiens
ggcctcggcaagacgc

SEQ ID NO: 5415 - DNA, 16 bp, Homo sapiens
acttaggttactccta

SEQ ID NO: 5416 - DNA, 16 bp, Homo sapiens
cggcctgaggccctgc

SEQ ID NO: 5417 - DNA, 16 bp, Homo sapiens
aaactgagcgaggagt

SEQ ID NO: 5418 - DNA, 16 bp, Homo sapiens
gcttaatgccttgcct

SEQ ID NO: 5419 - DNA, 14 bp, Homo sapiens
aagattggtcagga

SEQ ID NO: 5420 - DNA, 16 bp, Homo sapiens
aaccaggtcgacacat

SEQ ID NO: 5421 - DNA, 16 bp, Homo sapiens
ctctagaggccctccc

SEQ ID NO: 5422 - DNA, 16 bp, Homo sapiens
gcgcagggtcccgtat

SEQ ID NO: 5423 - DNA, 20 bp, Homo sapiens
gtcttgctatctaaaggaat

SEQ ID NO: 5424 - DNA, 16 bp, Homo sapiens
gttctcaggcgacacc

SEQ ID NO: 5425 - DNA, 16 bp, Homo sapiens
tgattcagtgccgccc

SEQ ID NO: 5426 - DNA, 16 bp, Homo sapiens
acctatcgcatgccag

SEQ ID NO: 5427 - DNA, 16 bp, Homo sapiens
tcacaattggtgcctt

SEQ ID NO: 5428 - DNA, 16 bp, Homo sapiens
gtctctggtccttact

SEQ ID NO: 5429 - DNA, 16 bp, Homo sapiens
tctccacatcacggat

SEQ ID NO: 5430 - DNA, 16 bp, Homo sapiens
tgttaattgtgcactt

SEQ ID NO: 5431 - DNA, 16 bp, Homo sapiens
caagaaaccaaacgca

SEQ ID NO: 5432 - DNA, 16 bp, Homo sapiens
ttgatagtcggttgtc

SEQ ID NO: 5433 - DNA, 16 bp, Homo sapiens
ttttggacttgcagtg

SEQ ID NO: 5434 - DNA, 16 bp, Homo sapiens
gcccaacccacgctgc

SEQ ID NO: 5435 - DNA, 20 bp, Homo sapiens
tcatagaacacctccgtctc

SEQ ID NO: 5436 - DNA, 19 bp, Homo sapiens
cccaccgtgttttctggat

SEQ ID NO: 5437 - DNA, 16 bp, Homo sapiens
gaggaatagggcaagg

SEQ ID NO: 5438 - DNA, 20 bp, Homo sapiens
tcagtctggtccatggagaa

SEQ ID NO: 5439 - DNA, 16 bp, Homo sapiens
atggcctcgaatgcca

SEQ ID NO: 5440 - DNA, 16 bp, Homo sapiens
ggccattcccggagct

SEQ ID NO: 5441 - DNA, 16 bp, Homo sapiens
acagatgggcacaccg

SEQ ID NO: 5442 - DNA, 16 bp, Homo sapiens
ttgaggtaagggttac

SEQ ID NO: 5443 - DNA, 16 bp, Homo sapiens
gcatagacaaatccca

SEQ ID NO: 5444 - DNA, 16 bp, Homo sapiens
caacaagccactgagc

SEQ ID NO: 5445 - DNA, 12 bp, Homo sapiens
gcaaaactcatt

SEQ ID NO: 5446 - DNA, 20 bp, Homo sapiens
agttgcattcaatgttctga

SEQ ID NO: 5447 - DNA, 16 bp, Homo sapiens
agaccacgagatcaac

SEQ ID NO: 5448 - DNA, 16 bp, Homo sapiens
gagaacaagaaggctc

SEQ ID NO: 5449 - DNA, 16 bp, Homo sapiens
ggtcgcggatggactt

SEQ ID NO: 5450 - DNA, 16 bp, Homo sapiens
ggattaggtattatgg

SEQ ID NO: 5451 - DNA, 16 bp, Homo sapiens
actctggacccaaacc

SEQ ID NO: 5452 - DNA, 16 bp, Homo sapiens
cctcaacgacctggcc

SEQ ID NO: 5453 - DNA, 16 bp, Homo sapiens
accttaagtttcttgt

SEQ ID NO: 5454 - DNA, 16 bp, Homo sapiens
tcgatttgattctgag

SEQ ID NO: 5455 - DNA, 16 bp, Homo sapiens
gaaggactatgtacac

SEQ ID NO: 5456 - DNA, 16 bp, Homo sapiens
accaggtcgacacatt

SEQ ID NO: 5457 - DNA, 16 bp, Homo sapiens
cgacacccagctccgg

SEQ ID NO: 5458 - DNA, 16 bp, Homo sapiens
aaagaaggagttacgg

SEQ ID NO: 5459 - DNA, 16 bp, Homo sapiens
gatgatgtgtttcctg

SEQ ID NO: 5460 - DNA, 16 bp, Homo sapiens
gcttgacgacctgctt

SEQ ID NO: 5461 - DNA, 16 bp, Homo sapiens
tcaaagctgagtgtca

SEQ ID NO: 5462 - DNA, 16 bp, Homo sapiens
tggttatgagattctt

SEQ ID NO: 5463 - DNA, 19 bp, Homo sapiens
tctgctttttcatggacca

SEQ ID NO: 5464 - DNA, 16 bp, Homo sapiens
ggacaagcacccctct

SEQ ID NO: 5465 - DNA, 16 bp, Homo sapiens
aggaggtgacggaacc

SEQ ID NO: 5466 - DNA, 16 bp, Homo sapiens
taataatggatggaac

SEQ ID NO: 5467 - DNA, 20 bp, Homo sapiens
tgggcctcgagccccaaaac

SEQ ID NO: 5468 - DNA, 16 bp, Homo sapiens
actctacccgcaccct

SEQ ID NO: 5469 - DNA, 16 bp, Homo sapiens
caccaatggccttctt

SEQ ID NO: 5470 - DNA, 16 bp, Homo sapiens
ctggaacctcctactg

SEQ ID NO: 5471 - DNA, 16 bp, Homo sapiens
cctgccggacttcatc

SEQ ID NO: 5472 - DNA, 16 bp, Homo sapiens
gtaataacatgtgtcg

SEQ ID NO: 5473 - DNA, 16 bp, Homo sapiens
gtctttccgtcacagt

SEQ ID NO: 5474 - DNA, 16 bp, Homo sapiens
acgaaagtgaggagtc

SEQ ID NO: 5475 - DNA, 16 bp, Homo sapiens
acaaaaatatacgggc

SEQ ID NO: 5476 - DNA, 16 bp, Homo sapiens
gttaacaacaattgtc

SEQ ID NO: 5477 - DNA, 16 bp, Homo sapiens
gggagcagagcatagg

SEQ ID NO: 5478 - DNA, 16 bp, Homo sapiens
aggatatagggtctcc

SEQ ID NO: 5479 - DNA, 16 bp, Homo sapiens
gtacatactgcagcag

SEQ ID NO: 5480 - DNA, 25 bp, Homo sapiens
agcaatgttatctgcttcctccaac

SEQ ID NO: 5481 - DNA, 16 bp, Homo sapiens
tgattgaggtaagggt

SEQ ID NO: 5482 - DNA, 16 bp, Homo sapiens
ccgaactggccgagat

SEQ ID NO: 5483 - DNA, 18 bp, Homo sapiens
gcctctccatccctccaa

SEQ ID NO: 5484 - DNA, 16 bp, Homo sapiens
gcattttctcacatta

SEQ ID NO: 5485 - DNA, 16 bp, Homo sapiens
gcagatggtggtctac

SEQ ID NO: 5486 - DNA, 16 bp, Homo sapiens
ctgaaaactagacttg

SEQ ID NO: 5487 - DNA, 12 bp, Homo sapiens
gtcctattgcca

SEQ ID NO: 5488 - DNA, 16 bp, Homo sapiens
ccgttcccggatgtaa

SEQ ID NO: 5489 - DNA, 16 bp, Homo sapiens
tggtccgtaggccttg

SEQ ID NO: 5490 - DNA, 18 bp, Homo sapiens
actcaaggtagccaaagg

SEQ ID NO: 5491 - DNA, 16 bp, Homo sapiens
cagggcccctttgcgc

SEQ ID NO: 5492 - DNA, 16 bp, Homo sapiens
gatctaatcagaagca

SEQ ID NO: 5493 - DNA, 16 bp, Homo sapiens
tttccaacctgtttgg

SEQ ID NO: 5494 - DNA, 16 bp, Homo sapiens
agccatccagtcttag

SEQ ID NO: 5495 - DNA, 16 bp, Homo sapiens
gtaaaaaagtaggatg

SEQ ID NO: 5496 - DNA, 18 bp, Homo sapiens
tacttggcagagtcggag

SEQ ID NO: 5497 - DNA, 14 bp, Homo sapiens
gaacagttaaacat

SEQ ID NO: 5498 - DNA, 18 bp, Homo sapiens
tcaaaatacctggtgtca

SEQ ID NO: 5499 - DNA, 16 bp, Homo sapiens
ggcgacctcagcaaag

SEQ ID NO: 5500 - DNA, 15 bp, Homo sapiens
ttgatctgtagcagc

SEQ ID NO: 5501 - DNA, 16 bp, Homo sapiens
ggtgatccgatgctgg

SEQ ID NO: 5502 - DNA, 16 bp, Homo sapiens
caagaagtcactgatc

SEQ ID NO: 5503 - DNA, 16 bp, Homo sapiens
ggattattacatgagt

SEQ ID NO: 5504 - DNA, 16 bp, Homo sapiens
tggacttaatttacac

SEQ ID NO: 5505 - DNA, 16 bp, Homo sapiens
ggcaacatcactctaa

SEQ ID NO: 5506 - DNA, 16 bp, Homo sapiens
ctcggcacactttttt

SEQ ID NO: 5507 - DNA, 16 bp, Homo sapiens
tgcctaccattgcact

SEQ ID NO: 5508 - DNA, 19 bp, Homo sapiens
aatgcttccccacaccttc

SEQ ID NO: 5509 - DNA, 16 bp, Homo sapiens
tgtccagtcctaagac

SEQ ID NO: 5510 - DNA, 16 bp, Homo sapiens
actgagcgaggagtgg

SEQ ID NO: 5511 - DNA, 16 bp, Homo sapiens
acacatcttaggcaga

SEQ ID NO: 5512 - DNA, 16 bp, Homo sapiens
agcgagttgatagtcg

SEQ ID NO: 5513 - DNA, 16 bp, Homo sapiens
tcagaagagaggacct

SEQ ID NO: 5514 - DNA, 16 bp, Homo sapiens
tcacaacaatttgcta

SEQ ID NO: 5515 - DNA, 18 bp, Homo sapiens
ctcctggtgtgctcgtct

SEQ ID NO: 5516 - DNA, 16 bp, Homo sapiens
ttttaggaggtgacgg

SEQ ID NO: 5517 - DNA, 18 bp, Homo sapiens
ccggttctgaaggtgttc

SEQ ID NO: 5518 - DNA, 16 bp, Homo sapiens
agtcaaggagaacatg

SEQ ID NO: 5519 - DNA, 16 bp, Homo sapiens
gcaaacctcagtctcg

SEQ ID NO: 5520 - DNA, 16 bp, Homo sapiens
gcaaccaaggtctgaa

SEQ ID NO: 5521 - DNA, 16 bp, Homo sapiens
gccaacggctccgggc

SEQ ID NO: 5522 - DNA, 12 bp, Homo sapiens
atgtcaaggtca

SEQ ID NO: 5523 - DNA, 16 bp, Homo sapiens
gacttataggctcact

SEQ ID NO: 5524 - DNA, 23 bp, Homo sapiens
ccagagcaggtacctccaacatc

SEQ ID NO: 5525 - DNA, 16 bp, Homo sapiens
ataatattgtcaccct

SEQ ID NO: 5526 - DNA, 16 bp, Homo sapiens
atgtattacctacggc

SEQ ID NO: 5527 - DNA, 16 bp, Homo sapiens
attacttgtttgcagc

SEQ ID NO: 5528 - DNA, 16 bp, Homo sapiens
gctattataactccta

SEQ ID NO: 5529 - DNA, 16 bp, Homo sapiens
cctacatgggctttcc

SEQ ID NO: 5530 - DNA, 16 bp, Homo sapiens
ctacatggtgatgggt

SEQ ID NO: 5531 - DNA, 16 bp, Homo sapiens
ggccatcttccgccct

SEQ ID NO: 5532 - DNA, 18 bp, Homo sapiens
gccctgcagctctgcagt

SEQ ID NO: 5533 - DNA, 18 bp, Homo sapiens
gccatgatggactccaga

SEQ ID NO: 5534 - DNA, 16 bp, Homo sapiens
aacgataaaacaacac

SEQ ID NO: 5535 - DNA, 16 bp, Homo sapiens
taggatcggctcagct

SEQ ID NO: 5536 - DNA, 16 bp, Homo sapiens
atatatactggacacg

SEQ ID NO: 5537 - DNA, 22 bp, Homo sapiens
cagttgcattcaatgttctgac

SEQ ID NO: 5538 - DNA, 16 bp, Homo sapiens
tgagattacgcaccac

SEQ ID NO: 5539 - DNA, 16 bp, Homo sapiens
taattttctagacttt

SEQ ID NO: 5540 - DNA, 16 bp, Homo sapiens
ctgcagatcaactgct

SEQ ID NO: 5541 - DNA, 18 bp, Homo sapiens
gcttagatccaaaaggaa

SEQ ID NO: 5542 - DNA, 16 bp, Homo sapiens
aaatggactagaaggg

SEQ ID NO: 5543 - DNA, 18 bp, Homo sapiens
agcatgttcccaattctc

SEQ ID NO: 5544 - DNA, 16 bp, Homo sapiens
gtcgggccgaaagttc

SEQ ID NO: 5545 - DNA, 20 bp, Homo sapiens
accagagccctttgcaagtg

SEQ ID NO: 5546 - DNA, 16 bp, Homo sapiens
cgaggcctagtcgagc

SEQ ID NO: 5547 - DNA, 19 bp, Homo sapiens
cagtcagtcctttaatgct

SEQ ID NO: 5548 - DNA, 16 bp, Homo sapiens
ctattatccagcactg

SEQ ID NO: 5549 - DNA, 15 bp, Homo sapiens
cgagtaggtcaccct

SEQ ID NO: 5550 - DNA, 16 bp, Homo sapiens
taccatttttcagcag

SEQ ID NO: 5551 - DNA, 20 bp, Homo sapiens
caaagaaattctgacaagtt

SEQ ID NO: 5552 - DNA, 12 bp, Homo sapiens
ggcatgaccatg

SEQ ID NO: 5553 - DNA, 16 bp, Homo sapiens
ccaaggaacacatcac

SEQ ID NO: 5554 - DNA, 16 bp, Homo sapiens
gcgcagagggcctcgc

SEQ ID NO: 5555 - DNA, 16 bp, Homo sapiens
cgcctagcctgggttc

SEQ ID NO: 5556 - DNA, 16 bp, Homo sapiens
gctgaatcttgtgttt

SEQ ID NO: 5557 - DNA, 16 bp, Homo sapiens
ggataattatgtccca

SEQ ID NO: 5558 - DNA, 16 bp, Homo sapiens
tgtaatctgccagttt

SEQ ID NO: 5559 - DNA, 20 bp, Homo sapiens
tgtgtcaccagagtaacagt

SEQ ID NO: 5560 - DNA, 16 bp, Homo sapiens
cccatctgagctgtgt

SEQ ID NO: 5561 - DNA, 16 bp, Homo sapiens
tgttagtctcagggaa

SEQ ID NO: 5562 - DNA, 16 bp, Homo sapiens
gcacggcacggcagga

SEQ ID NO: 5563 - DNA, 16 bp, Homo sapiens
gggagaggtgccggtc

SEQ ID NO: 5564 - DNA, 16 bp, Homo sapiens
tccatttgggctgtgc

SEQ ID NO: 5565 - DNA, 14 bp, Homo sapiens
tccggcagcagatg

SEQ ID NO: 5566 - DNA, 16 bp, Homo sapiens
cccggagagctccaga

SEQ ID NO: 5567 - DNA, 16 bp, Homo sapiens
tacttaccaggatctc

SEQ ID NO: 5568 - DNA, 15 bp, Homo sapiens
ctaaaactaacttga

SEQ ID NO: 5569 - DNA, 16 bp, Homo sapiens
gattttaggaggtgac

SEQ ID NO: 5570 - DNA, 20 bp, Homo sapiens
tatctccaaactcatgaaca

SEQ ID NO: 5571 - DNA, 21 bp, Homo sapiens
cagattaataactgtagcatt

SEQ ID NO: 5572 - DNA, 16 bp, Homo sapiens
gcacttacagtggtca

SEQ ID NO: 5573 - DNA, 20 bp, Homo sapiens
tctcctcatggtcgcaggga

SEQ ID NO: 5574 - DNA, 16 bp, Homo sapiens
ggaaacggcctgggca

SEQ ID NO: 5575 - DNA, 14 bp, Homo sapiens
ggtgtttttccacc

SEQ ID NO: 5576 - DNA, 16 bp, Homo sapiens
tcccaagtgcccccca

SEQ ID NO: 5577 - DNA, 12 bp, Homo sapiens
tccctctacacc

SEQ ID NO: 5578 - DNA, 20 bp, Homo sapiens
cactggtccattactttcct

SEQ ID NO: 5579 - DNA, 16 bp, Homo sapiens
tactttgccatatgca

SEQ ID NO: 5580 - DNA, 16 bp, Homo sapiens
gatgtgtttcctgtgt

SEQ ID NO: 5581 - DNA, 16 bp, Homo sapiens
gcctagaggtaggagc

SEQ ID NO: 5582 - DNA, 20 bp, Homo sapiens
ggaatgtttattgggcgatc

SEQ ID NO: 5583 - DNA, 16 bp, Homo sapiens
ggtaataacatgtgtc

SEQ ID NO: 5584 - DNA, 18 bp, Homo sapiens
ccgaaagtgcccttgccc

SEQ ID NO: 5585 - DNA, 18 bp, Homo sapiens
taagacctgctcagcttc

SEQ ID NO: 5586 - DNA, 18 bp, Homo sapiens
cgagaggcggacgggacc

SEQ ID NO: 5587 - DNA, 16 bp, Homo sapiens
ggtaacaacatctacc

SEQ ID NO: 5588 - DNA, 16 bp, Homo sapiens
ttactttgccatatgc

SEQ ID NO: 5589 - DNA, 18 bp, Homo sapiens
taaatagctggagatggt

SEQ ID NO: 5590 - DNA, 16 bp, Homo sapiens
ttgcacaacaaagagc

SEQ ID NO: 5591 - DNA, 16 bp, Homo sapiens
cgcaagaagacattaa

SEQ ID NO: 5592 - DNA, 16 bp, Homo sapiens
tttatgaccgtggcca

SEQ ID NO: 5593 - DNA, 16 bp, Homo sapiens
ggactatgtacacctc

SEQ ID NO: 5594 - DNA, 16 bp, Homo sapiens
cccaaaggatagagta

SEQ ID NO: 5595 - DNA, 14 bp, Homo sapiens
ggcagtctttatcc

SEQ ID NO: 5596 - DNA, 16 bp, Homo sapiens
tagcactaaactaatg

SEQ ID NO: 5597 - DNA, 16 bp, Homo sapiens
gagcgaggagtgggtg

SEQ ID NO: 5598 - DNA, 16 bp, Homo sapiens
caaacaacttcttggc

SEQ ID NO: 5599 - DNA, 19 bp, Homo sapiens
gctagttcatcccagtgag

SEQ ID NO: 5600 - DNA, 16 bp, Homo sapiens
tggaagatgcgattga

SEQ ID NO: 5601 - DNA, 14 bp, Homo sapiens
gtagagaacagcca

SEQ ID NO: 5602 - DNA, 20 bp, Homo sapiens
catggaccaccagtgtgcgg

SEQ ID NO: 5603 - DNA, 17 bp, Homo sapiens
tgctagttcatcccagt

SEQ ID NO: 5604 - DNA, 18 bp, Homo sapiens
tgttcctataactggtaa

SEQ ID NO: 5605 - DNA, 16 bp, Homo sapiens
aggaatcctgcagctc

SEQ ID NO: 5606 - DNA, 16 bp, Homo sapiens
tcatatcaccacttgc

SEQ ID NO: 5607 - DNA, 16 bp, Homo sapiens
atcgacttccttggcc

SEQ ID NO: 5608 - DNA, 16 bp, Homo sapiens
gggtacagacttatcc

SEQ ID NO: 5609 - DNA, 16 bp, Homo sapiens
accgagcccactgggc

SEQ ID NO: 5610 - DNA, 18 bp, Homo sapiens
ctcgctgtccacacactc

SEQ ID NO: 5611 - DNA, 16 bp, Homo sapiens
tgtcttcgagccacac

SEQ ID NO: 5612 - DNA, 16 bp, Homo sapiens
ctaaatgtcacttagc

SEQ ID NO: 5613 - DNA, 16 bp, Homo sapiens
tctgtagccgttgctc

SEQ ID NO: 5614 - DNA, 16 bp, Homo sapiens
aatatacgggcatgtt

SEQ ID NO: 5615 - DNA, 16 bp, Homo sapiens
atggagaaggtgttct

SEQ ID NO: 5616 - DNA, 16 bp, Homo sapiens
ctcaatgtgtacagta

SEQ ID NO: 5617 - DNA, 16 bp, Homo sapiens
ggtatttgtagtgtgg

SEQ ID NO: 5618 - DNA, 20 bp, Homo sapiens
aacaatgtcatgttccaggt

SEQ ID NO: 5619 - DNA, 16 bp, Homo sapiens
cttcaccgtttggcca

SEQ ID NO: 5620 - DNA, 18 bp, Homo sapiens
cgactccaccaggacttg

SEQ ID NO: 5621 - DNA, 20 bp, Homo sapiens
ccatacagggtttttattca

SEQ ID NO: 5622 - DNA, 16 bp, Homo sapiens
ggatagccggccccgc

SEQ ID NO: 5623 - DNA, 16 bp, Homo sapiens
acaaacacggctcagc

SEQ ID NO: 5624 - DNA, 16 bp, Homo sapiens
atgcagctgtcagcat

SEQ ID NO: 5625 - DNA, 16 bp, Homo sapiens
ctccactggcctgcta

SEQ ID NO: 5626 - DNA, 16 bp, Homo sapiens
cagcaatcgacccacc

SEQ ID NO: 5627 - DNA, 16 bp, Homo sapiens
aactgagcttactggt

SEQ ID NO: 5628 - DNA, 20 bp, Homo sapiens
gataacacgttagggcttct

SEQ ID NO: 5629 - DNA, 18 bp, Homo sapiens
gcccgtgccgagcagcag

SEQ ID NO: 5630 - DNA, 16 bp, Homo sapiens
tgctagtgactccatc

SEQ ID NO: 5631 - DNA, 16 bp, Homo sapiens
gtaagtaagcactttt

SEQ ID NO: 5632 - DNA, 16 bp, Homo sapiens
gtttggactgttttcc

SEQ ID NO: 5633 - DNA, 14 bp, Homo sapiens
gatttatctggctg

SEQ ID NO: 5634 - DNA, 16 bp, Homo sapiens
taccgagcccactggg

SEQ ID NO: 5635 - DNA, 16 bp, Homo sapiens
ctgactgtgtactcag

SEQ ID NO: 5636 - DNA, 16 bp, Homo sapiens
tatcatttggcagcca

SEQ ID NO: 5637 - DNA, 16 bp, Homo sapiens
tgatatgcagtgacac

SEQ ID NO: 5638 - DNA, 16 bp, Homo sapiens
cttggtgatacccggg

SEQ ID NO: 5639 - DNA, 16 bp, Homo sapiens
tcccatctttggctgc

SEQ ID NO: 5640 - DNA, 16 bp, Homo sapiens
tgcgcagtgcggtgtc

SEQ ID NO: 5641 - DNA, 16 bp, Homo sapiens
cgccgaccctcaacga

SEQ ID NO: 5642 - DNA, 20 bp, Homo sapiens
ccaaatcaccagcatccaga

SEQ ID NO: 5643 - DNA, 20 bp, Homo sapiens
cagtcatatctggtcagttc

SEQ ID NO: 5644 - DNA, 16 bp, Homo sapiens
gtgtcaagggttctgg

SEQ ID NO: 5645 - DNA, 18 bp, Homo sapiens
acatagcgcctctgactg

SEQ ID NO: 5646 - DNA, 16 bp, Homo sapiens
aggcattgagaacttt

SEQ ID NO: 5647 - DNA, 16 bp, Homo sapiens
gctctcccggctgatg

SEQ ID NO: 5648 - DNA, 16 bp, Homo sapiens
taatgggaagttgata

SEQ ID NO: 5649 - DNA, 16 bp, Homo sapiens
gcgcaagggaaacggc

SEQ ID NO: 5650 - DNA, 16 bp, Homo sapiens
caataagtaactctga

SEQ ID NO: 5651 - DNA, 16 bp, Homo sapiens
ccctacagacacttgc

SEQ ID NO: 5652 - DNA, 20 bp, Homo sapiens
tactgtcctgtggtgacttg

SEQ ID NO: 5653 - DNA, 16 bp, Homo sapiens
ggcccacccatcaggg

SEQ ID NO: 5654 - DNA, 12 bp, Homo sapiens
tggctgaagaaa

SEQ ID NO: 5655 - DNA, 16 bp, Homo sapiens
tgtaagtggtgacgat

SEQ ID NO: 5656 - DNA, 16 bp, Homo sapiens
cgcccccctcgaggcc

SEQ ID NO: 5657 - DNA, 18 bp, Homo sapiens
tgaggaagaggatgacgg

SEQ ID NO: 5658 - DNA, 16 bp, Homo sapiens
aggctgtgtggttaat

SEQ ID NO: 5659 - DNA, 20 bp, Homo sapiens
tccaacatgcctaataatga

SEQ ID NO: 5660 - DNA, 18 bp, Homo sapiens
cgcctgcggtcgtagcat

SEQ ID NO: 5661 - DNA, 16 bp, Homo sapiens
gggaaggactatgtac

SEQ ID NO: 5662 - DNA, 20 bp, Homo sapiens
atccaaagctctgagtaatt

SEQ ID NO: 5663 - DNA, 18 bp, Homo sapiens
caagatcttcacaaaagg

SEQ ID NO: 5664 - DNA, 30 bp, Homo sapiens
acatcaaggaagatggcatttctagtttgg

SEQ ID NO: 5665 - DNA, 16 bp, Homo sapiens
acgaagaccccccagg

SEQ ID NO: 5666 - DNA, 16 bp, Homo sapiens
cacaacaacacttcct

SEQ ID NO: 5667 - DNA, 16 bp, Homo sapiens
atacatgaggtccggg

SEQ ID NO: 5668 - DNA, 20 bp, Homo sapiens
tgggcacccgcaagacccgg

SEQ ID NO: 5669 - DNA, 21 bp, Homo sapiens
tttccttagtaaccacaggtt

SEQ ID NO: 5670 - DNA, 16 bp, Homo sapiens
gcataggccaacgcag

SEQ ID NO: 5671 - DNA, 16 bp, Homo sapiens
gggcaccgtggaccgg

SEQ ID NO: 5672 - DNA, 16 bp, Homo sapiens
ggtattaacctcatga

SEQ ID NO: 5673 - DNA, 16 bp, Homo sapiens
ccaatttgggcatcaa

SEQ ID NO: 5674 - DNA, 16 bp, Homo sapiens
taaatgacaagggtca

SEQ ID NO: 5675 - DNA, 16 bp, Homo sapiens
catccggttctcaggc

SEQ ID NO: 5676 - DNA, 16 bp, Homo sapiens
agtgactcggcagtca

SEQ ID NO: 5677 - DNA, 12 bp, Homo sapiens
cagcggctcaac

SEQ ID NO: 5678 - DNA, 16 bp, Homo sapiens
gtgagactcggtgtaa

SEQ ID NO: 5679 - DNA, 16 bp, Homo sapiens
gccaggcttgccgctg

SEQ ID NO: 5680 - DNA, 16 bp, Homo sapiens
attttgatagctccac

SEQ ID NO: 5681 - DNA, 16 bp, Homo sapiens
tacaaagtgtctggcg

SEQ ID NO: 5682 - DNA, 20 bp, Homo sapiens
gagcttcccagcacgggcac

SEQ ID NO: 5683 - DNA, 14 bp, Homo sapiens
gtctgcttcgcacc

SEQ ID NO: 5684 - DNA, 16 bp, Homo sapiens
gttattaaccccctgt

SEQ ID NO: 5685 - DNA, 16 bp, Homo sapiens
gtggaagatgcgattg

SEQ ID NO: 5686 - DNA, 16 bp, Homo sapiens
aagcccggtcctgact

SEQ ID NO: 5687 - DNA, 16 bp, Homo sapiens
ggaaattcatagatgt

SEQ ID NO: 5688 - DNA, 16 bp, Homo sapiens
ggacaaagcacacctg

SEQ ID NO: 5689 - DNA, 18 bp, Homo sapiens
gtatttagcatgttccca

SEQ ID NO: 5690 - DNA, 16 bp, Homo sapiens
ggcacttacagtggtc

SEQ ID NO: 5691 - DNA, 16 bp, Homo sapiens
gaatgaattctggtct

SEQ ID NO: 5692 - DNA, 16 bp, Homo sapiens
gtgttatatgtgtggc

SEQ ID NO: 5693 - DNA, 16 bp, Homo sapiens
cgcccttggtgcccgc

SEQ ID NO: 5694 - DNA, 18 bp, Homo sapiens
gccttgttctgctcgtac

SEQ ID NO: 5695 - DNA, 16 bp, Homo sapiens
tgcaatggagtccaaa

SEQ ID NO: 5696 - DNA, 14 bp, Homo sapiens
gatgttggccgtgg

SEQ ID NO: 5697 - DNA, 16 bp, Homo sapiens
aaatagacgatctcac

SEQ ID NO: 5698 - DNA, 18 bp, Homo sapiens
tgatattctgctccccaa

SEQ ID NO: 5699 - DNA, 16 bp, Homo sapiens
acttatcgcaaggaac

SEQ ID NO: 5700 - DNA, 16 bp, Homo sapiens
caatgtccagtcctaa

SEQ ID NO: 5701 - DNA, 12 bp, Homo sapiens
cacgctctatac

SEQ ID NO: 5702 - DNA, 16 bp, Homo sapiens
atgcaggctgggaacc

SEQ ID NO: 5703 - DNA, 16 bp, Homo sapiens
ggaaagaagtgctatt

SEQ ID NO: 5704 - DNA, 16 bp, Homo sapiens
acagagtgcaggcact

SEQ ID NO: 5705 - DNA, 16 bp, Homo sapiens
aactatcccaagctcc

SEQ ID NO: 5706 - DNA, 16 bp, Homo sapiens
ccataaaatcagccta

SEQ ID NO: 5707 - DNA, 18 bp, Homo sapiens
tgtttgtgtccatcggct

SEQ ID NO: 5708 - DNA, 19 bp, Homo sapiens
tctggcaaaatacaggtca

SEQ ID NO: 5709 - DNA, 16 bp, Homo sapiens
tcaaatgggaaccgct

SEQ ID NO: 5710 - DNA, 16 bp, Homo sapiens
gttcatcacggaaggt

SEQ ID NO: 5711 - DNA, 16 bp, Homo sapiens
caaaatcgggttatct

SEQ ID NO: 5712 - DNA, 16 bp, Homo sapiens
atatgattcatctcgg

SEQ ID NO: 5713 - DNA, 16 bp, Homo sapiens
aaaaatgggctgcccc

SEQ ID NO: 5714 - DNA, 16 bp, Homo sapiens
ctggcaaccaaggtct

SEQ ID NO: 5715 - DNA, 16 bp, Homo sapiens
gaacctcgctccgtgc

SEQ ID NO: 5716 - DNA, 16 bp, Homo sapiens
ggtcattaaagattct

SEQ ID NO: 5717 - DNA, 16 bp, Homo sapiens
atattaatgcagtggt

SEQ ID NO: 5718 - DNA, 16 bp, Homo sapiens
cagtatgtatacttcc

SEQ ID NO: 5719 - DNA, 16 bp, Homo sapiens
gggctctttcagcttg

SEQ ID NO: 5720 - DNA, 16 bp, Homo sapiens
actttaacaagtcccg

SEQ ID NO: 5721 - DNA, 16 bp, Homo sapiens
tcattattggcttgga

SEQ ID NO: 5722 - DNA, 16 bp, Homo sapiens
cgggagactgcagagg

SEQ ID NO: 5723 - DNA, 20 bp, Homo sapiens
tcataataagtgccatacag

SEQ ID NO: 5724 - DNA, 16 bp, Homo sapiens
cccaagtggtgaggct

SEQ ID NO: 5725 - DNA, 16 bp, Homo sapiens
aagctcctgcgccgcg

SEQ ID NO: 5726 - DNA, 19 bp, Homo sapiens
gtgatttaagtctggcaaa

SEQ ID NO: 5727 - DNA, 16 bp, Homo sapiens
agccactgccttgtat

SEQ ID NO: 5728 - DNA, 20 bp, Homo sapiens
tcagggttcagagtgttgta

SEQ ID NO: 5729 - DNA, 16 bp, Homo sapiens
taggaggtgacggaac

SEQ ID NO: 5730 - DNA, 18 bp, Homo sapiens
tccatggttcacagactg

SEQ ID NO: 5731 - DNA, 20 bp, Homo sapiens
ttttcatggacctgtaaaaa

SEQ ID NO: 5732 - DNA, 16 bp, Homo sapiens
gtggactgaggttcag

SEQ ID NO: 5733 - DNA, 16 bp, Homo sapiens
taatattgtcaccctc

SEQ ID NO: 5734 - DNA, 16 bp, Homo sapiens
gaaaagcccggtcctg

SEQ ID NO: 5735 - DNA, 16 bp, Homo sapiens
acacagtggtggtccc

SEQ ID NO: 5736 - DNA, 16 bp, Homo sapiens
attcatagtaccccac

SEQ ID NO: 5737 - DNA, 16 bp, Homo sapiens
gtcttgtgggatgtga

SEQ ID NO: 5738 - DNA, 20 bp, Homo sapiens
tctctcatttcctcatggtc

SEQ ID NO: 5739 - DNA, 16 bp, Homo sapiens
cttaccaacagtaaca

SEQ ID NO: 5740 - DNA, 20 bp, Homo sapiens
ccgccccagttggtctcaca

SEQ ID NO: 5741 - DNA, 16 bp, Homo sapiens
ggagcagagcatagga

SEQ ID NO: 5742 - DNA, 19 bp, Homo sapiens
ccacaggttgtgtcaccag

SEQ ID NO: 5743 - DNA, 18 bp, Homo sapiens
ctccgctccgaccgctgg

SEQ ID NO: 5744 - DNA, 16 bp, Homo sapiens
ctcaagctatcaagct

SEQ ID NO: 5745 - DNA, 20 bp, Homo sapiens
ctgctggaagcaaaggcagg

SEQ ID NO: 5746 - DNA, 16 bp, Homo sapiens
ggcctgaaagagccca

SEQ ID NO: 5747 - DNA, 20 bp, Homo sapiens
ttagttcaaactgagttaat

SEQ ID NO: 5748 - DNA, 16 bp, Homo sapiens
gaccagagacgggagg

SEQ ID NO: 5749 - DNA, 16 bp, Homo sapiens
tcaattagtgttgcct

SEQ ID NO: 5750 - DNA, 16 bp, Homo sapiens
ctctaaaagtacctac

SEQ ID NO: 5751 - DNA, 16 bp, Homo sapiens
tgggtttttgagaggt

SEQ ID NO: 5752 - DNA, 20 bp, Homo sapiens
taaactccctagccaaaaat

SEQ ID NO: 5753 - DNA, 20 bp, Homo sapiens
cctaatggcttccaccctct

SEQ ID NO: 5754 - DNA, 15 bp, Homo sapiens
taattttctagactt

SEQ ID NO: 5755 - DNA, 16 bp, Homo sapiens
gaaatctacctactcc

SEQ ID NO: 5756 - DNA, 16 bp, Homo sapiens
ccttaatcacttagcc

SEQ ID NO: 5757 - DNA, 16 bp, Homo sapiens
agccgggcttccgtct

SEQ ID NO: 5758 - DNA, 16 bp, Homo sapiens
tcgatgagggtcaagt

SEQ ID NO: 5759 - DNA, 16 bp, Homo sapiens
ggcattcccacccagg

SEQ ID NO: 5760 - DNA, 14 bp, Homo sapiens
ccttggaatgtctg

SEQ ID NO: 5761 - DNA, 14 bp, Homo sapiens
ggtacatggaagtc

SEQ ID NO: 5762 - DNA, 16 bp, Homo sapiens
tgccagcaagtcccca

SEQ ID NO: 5763 - DNA, 20 bp, Homo sapiens
tggtcatgttctcggagtct

SEQ ID NO: 5764 - DNA, 16 bp, Homo sapiens
cgcaatagagacacct

SEQ ID NO: 5765 - DNA, 16 bp, Homo sapiens
catattaatgcagtgg

SEQ ID NO: 5766 - DNA, 16 bp, Homo sapiens
actaatgacagacaac

SEQ ID NO: 5767 - DNA, 16 bp, Homo sapiens
ggtattatggtatgtg

SEQ ID NO: 5768 - DNA, 20 bp, Homo sapiens
atcattattatatgattaac

SEQ ID NO: 5769 - DNA, 20 bp, Homo sapiens
aatgaaaccctccaaggctt

SEQ ID NO: 5770 - DNA, 18 bp, Homo sapiens
tgtcacgttctcaaagca

SEQ ID NO: 5771 - DNA, 16 bp, Homo sapiens
ctggtaggcggaaggg

SEQ ID NO: 5772 - DNA, 16 bp, Homo sapiens
tttaccttgaatgtcc

SEQ ID NO: 5773 - DNA, 16 bp, Homo sapiens
gttgatgtaggactgc

SEQ ID NO: 5774 - DNA, 16 bp, Homo sapiens
acatatcctggccggg

SEQ ID NO: 5775 - DNA, 16 bp, Homo sapiens
agcatgatagggacag

SEQ ID NO: 5776 - DNA, 19 bp, Homo sapiens
catgaacatggaatccatg

SEQ ID NO: 5777 - DNA, 16 bp, Homo sapiens
caaaaaactaataccg

SEQ ID NO: 5778 - DNA, 16 bp, Homo sapiens
gcccacttattcctcc

SEQ ID NO: 5779 - DNA, 16 bp, Homo sapiens
tgcatatccaaagcca

SEQ ID NO: 5780 - DNA, 20 bp, Homo sapiens
catgctaaataattcctact

SEQ ID NO: 5781 - DNA, 16 bp, Homo sapiens
ttatttctaggcaggg

SEQ ID NO: 5782 - DNA, 16 bp, Homo sapiens
cactattggcacacca

SEQ ID NO: 5783 - DNA, 16 bp, Homo sapiens
aacagaaccacaccag

SEQ ID NO: 5784 - DNA, 20 bp, Homo sapiens
ttgtgcaattgtggctacca

SEQ ID NO: 5785 - DNA, 20 bp, Homo sapiens
ccctgcagtaggtttctgct

SEQ ID NO: 5786 - DNA, 16 bp, Homo sapiens
gtgatttacaggccca

SEQ ID NO: 5787 - DNA, 20 bp, Homo sapiens
ttcagattctttacttcgcc

SEQ ID NO: 5788 - DNA, 14 bp, Homo sapiens
ttggcagtggtgtt

SEQ ID NO: 5789 - DNA, 16 bp, Homo sapiens
gacaaatggatgaggc

SEQ ID NO: 5790 - DNA, 16 bp, Homo sapiens
caacagaagagtaggg

SEQ ID NO: 5791 - DNA, 16 bp, Homo sapiens
gccttctgagcaaaca

SEQ ID NO: 5792 - DNA, 18 bp, Homo sapiens
cagatgaaataggattat

SEQ ID NO: 5793 - DNA, 16 bp, Homo sapiens
agcaaaagggagcccc

SEQ ID NO: 5794 - DNA, 16 bp, Homo sapiens
gggagtaggctcgacc

SEQ ID NO: 5795 - DNA, 20 bp, Homo sapiens
cattactttcctttaagaaa

SEQ ID NO: 5796 - DNA, 12 bp, Homo sapiens
actgtggtcaaa

SEQ ID NO: 5797 - DNA, 16 bp, Homo sapiens
ttttccaacctgtttg

SEQ ID NO: 5798 - DNA, 16 bp, Homo sapiens
gctcggaggaacgagg

SEQ ID NO: 5799 - DNA, 25 bp, Homo sapiens
tccatcctcttgatatctccttttg

SEQ ID NO: 5800 - DNA, 19 bp, Homo sapiens
tttaaagcaactctgaaaa

SEQ ID NO: 5801 - DNA, 14 bp, Homo sapiens
atggtgtggtacag

SEQ ID NO: 5802 - DNA, 16 bp, Homo sapiens
gggttttaatagacac

SEQ ID NO: 5803 - DNA, 16 bp, Homo sapiens
agatgcgattgattcg

SEQ ID NO: 5804 - DNA, 16 bp, Homo sapiens
agttgatagtcggttg

SEQ ID NO: 5805 - DNA, 20 bp, Homo sapiens
cggtcgtagcattcctggat

SEQ ID NO: 5806 - DNA, 16 bp, Homo sapiens
ggctaaagagtaccca

SEQ ID NO: 5807 - DNA, 16 bp, Homo sapiens
gcccatctcacgcccc

SEQ ID NO: 5808 - DNA, 16 bp, Homo sapiens
gtacactcagaaagga

SEQ ID NO: 5809 - DNA, 18 bp, Homo sapiens
aaagttgaatgttgtaaa

SEQ ID NO: 5810 - DNA, 16 bp, Homo sapiens
gaccatcctatgagga

SEQ ID NO: 5811 - DNA, 16 bp, Homo sapiens
gggaaaagagtcaccc

SEQ ID NO: 5812 - DNA, 20 bp, Homo sapiens
ctagtgcttccatcggaagg

SEQ ID NO: 5813 - DNA, 16 bp, Homo sapiens
gctaaaattccactct

SEQ ID NO: 5814 - DNA, 16 bp, Homo sapiens
ggcttttgtcagagga

SEQ ID NO: 5815 - DNA, 20 bp, Homo sapiens
aggagcgtggagcttcccag

SEQ ID NO: 5816 - DNA, 16 bp, Homo sapiens
cgagttgatagtcggt

SEQ ID NO: 5817 - DNA, 16 bp, Homo sapiens
aggaacttcgcctctt

SEQ ID NO: 5818 - DNA, 16 bp, Homo sapiens
gtctgccgaggagtat

SEQ ID NO: 5819 - DNA, 16 bp, Homo sapiens
ctaatccgaggcaata

SEQ ID NO: 5820 - DNA, 18 bp, Homo sapiens
tcaaagacagtagggacg

SEQ ID NO: 5821 - DNA, 16 bp, Homo sapiens
gggcgaaccacccacc

SEQ ID NO: 5822 - DNA, 16 bp, Homo sapiens
gatactaaagtctgga

SEQ ID NO: 5823 - DNA, 20 bp, Homo sapiens
ataatgttccaattcctact

SEQ ID NO: 5824 - DNA, 16 bp, Homo sapiens
gttcaaagtgttgcat

SEQ ID NO: 5825 - DNA, 16 bp, Homo sapiens
gtagagtcccccccag

SEQ ID NO: 5826 - DNA, 16 bp, Homo sapiens
gtacatatcctggccg

SEQ ID NO: 5827 - DNA, 16 bp, Homo sapiens
tagaatatcaacacct

SEQ ID NO: 5828 - DNA, 16 bp, Homo sapiens
gccgatggagctgaag

SEQ ID NO: 5829 - DNA, 16 bp, Homo sapiens
tcaattgaggcttcta

SEQ ID NO: 5830 - DNA, 16 bp, Homo sapiens
atagatggagcaaatc

SEQ ID NO: 5831 - DNA, 16 bp, Homo sapiens
caccaatgaggcagac

SEQ ID NO: 5832 - DNA, 16 bp, Homo sapiens
cacaagcctgcggacc

SEQ ID NO: 5833 - DNA, 16 bp, Homo sapiens
cttgaatgtccatgcc

SEQ ID NO: 5834 - DNA, 16 bp, Homo sapiens
catttaactgttcacc

SEQ ID NO: 5835 - DNA, 16 bp, Homo sapiens
cgcaagccacagcagg

SEQ ID NO: 5836 - DNA, 16 bp, Homo sapiens
gcatgaggtcgcggat

SEQ ID NO: 5837 - DNA, 16 bp, Homo sapiens
agggagcagagcatag

SEQ ID NO: 5838 - DNA, 18 bp, Homo sapiens
aagaacagatcacaggtg

SEQ ID NO: 5839 - DNA, 16 bp, Homo sapiens
cgcttactgcaagttc

SEQ ID NO: 5840 - DNA, 16 bp, Homo sapiens
tggtagagggctggtg

SEQ ID NO: 5841 - DNA, 16 bp, Homo sapiens
acaaacaacacgcttg

SEQ ID NO: 5842 - DNA, 16 bp, Homo sapiens
atcaattagtgttgcc

SEQ ID NO: 5843 - DNA, 18 bp, Homo sapiens
atgttctccgtgtcggtg

SEQ ID NO: 5844 - DNA, 16 bp, Homo sapiens
tgctagatcaactagc

SEQ ID NO: 5845 - DNA, 16 bp, Homo sapiens
tctcatggcactcact

SEQ ID NO: 5846 - DNA, 20 bp, Homo sapiens
acatagcgcctctgactggg

SEQ ID NO: 5847 - DNA, 16 bp, Homo sapiens
ctccatgatgctccct

SEQ ID NO: 5848 - DNA, 16 bp, Homo sapiens
tgccgagggagcaata

SEQ ID NO: 5849 - DNA, 16 bp, Homo sapiens
agctatctgggttagg

SEQ ID NO: 5850 - DNA, 20 bp, Homo sapiens
aagatcactaaatgcaactt

SEQ ID NO: 5851 - DNA, 20 bp, Homo sapiens
tcagcacgcacacggccttc

SEQ ID NO: 5852 - DNA, 16 bp, Homo sapiens
ctttgccatatgcagc

SEQ ID NO: 5853 - DNA, 16 bp, Homo sapiens
gctcctgctaatggga

SEQ ID NO: 5854 - DNA, 18 bp, Homo sapiens
cccgcggctgctcacagg

SEQ ID NO: 5855 - DNA, 16 bp, Homo sapiens
atcaattttcacccag

SEQ ID NO: 5856 - DNA, 16 bp, Homo sapiens
ccgcagacaagccagg

SEQ ID NO: 5857 - DNA, 16 bp, Homo sapiens
tactagggcacttaag

SEQ ID NO: 5858 - DNA, 19 bp, Homo sapiens
tcacctcggtatttattgt

SEQ ID NO: 5859 - DNA, 16 bp, Homo sapiens
atctcctgccggactt

SEQ ID NO: 5860 - DNA, 16 bp, Homo sapiens
cgtgttgatgtaggac

SEQ ID NO: 5861 - DNA, 16 bp, Homo sapiens
cgccagattaattttg

SEQ ID NO: 5862 - DNA, 14 bp, Homo sapiens
ttgcactttgtggt

SEQ ID NO: 5863 - DNA, 19 bp, Homo sapiens
tcacctcggtatttattgt

SEQ ID NO: 5864 - DNA, 16 bp, Homo sapiens
atatggccgggaagga

SEQ ID NO: 5865 - DNA, 20 bp, Homo sapiens
tccaggttcaagtgggatac

SEQ ID NO: 5866 - DNA, 16 bp, Homo sapiens
aggaatacttgcagct

SEQ ID NO: 5867 - DNA, 16 bp, Homo sapiens
cactcggccgctcttc

SEQ ID NO: 5868 - DNA, 18 bp, Homo sapiens
ggaagaactctactttga

SEQ ID NO: 5869 - DNA, 16 bp, Homo sapiens
tttacacgcttccgcc

SEQ ID NO: 5870 - DNA, 16 bp, Homo sapiens
tagaacgggcctggcc

SEQ ID NO: 5871 - DNA, 12 bp, Homo sapiens
tgttccctctac

SEQ ID NO: 5872 - DNA, 16 bp, Homo sapiens
gaacagtacacttgac

SEQ ID NO: 5873 - DNA, 25 bp, Homo sapiens
ggatactagcaatgttatctgcttc

SEQ ID NO: 5874 - DNA, 12 bp, Homo sapiens
ccatggtgaaga

SEQ ID NO: 5875 - DNA, 18 bp, Homo sapiens
gaaaagcttctccaacac

SEQ ID NO: 5876 - DNA, 16 bp, Homo sapiens
tatagaaggcctgccc

SEQ ID NO: 5877 - DNA, 16 bp, Homo sapiens
gcccagtgtgagggtt

SEQ ID NO: 5878 - DNA, 20 bp, Homo sapiens
agccattctctgcccttcct

SEQ ID NO: 5879 - DNA, 15 bp, Homo sapiens
aactgctagcctctg

SEQ ID NO: 5880 - DNA, 16 bp, Homo sapiens
ggcactaccgagccca

SEQ ID NO: 5881 - DNA, 18 bp, Homo sapiens
gtggcgatgcggtcaacg

SEQ ID NO: 5882 - DNA, 16 bp, Homo sapiens
gcccaagccctcggcg

SEQ ID NO: 5883 - DNA, 20 bp, Homo sapiens
agctcctcgggctcctcctt

SEQ ID NO: 5884 - DNA, 16 bp, Homo sapiens
agccttactccctttc

SEQ ID NO: 5885 - DNA, 16 bp, Homo sapiens
aaaacagcgaggagga

SEQ ID NO: 5886 - DNA, 14 bp, Homo sapiens
cactgaacattgga

SEQ ID NO: 5887 - DNA, 16 bp, Homo sapiens
gtgaaaagcccggtcc

SEQ ID NO: 5888 - DNA, 16 bp, Homo sapiens
ctaaaagttcccagac

SEQ ID NO: 5889 - DNA, 12 bp, Homo sapiens
gaagaactctac

SEQ ID NO: 5890 - DNA, 16 bp, Homo sapiens
tttagcctctggattt

SEQ ID NO: 5891 - DNA, 16 bp, Homo sapiens
gtaaactttttggact

SEQ ID NO: 5892 - DNA, 16 bp, Homo sapiens
catattcatggtgtta

SEQ ID NO: 5893 - DNA, 18 bp, Homo sapiens
tgcagaaacaactccagg

SEQ ID NO: 5894 - DNA, 16 bp, Homo sapiens
agctatagggctgaac

SEQ ID NO: 5895 - DNA, 16 bp, Homo sapiens
cacttatagaaggcct

SEQ ID NO: 5896 - DNA, 16 bp, Homo sapiens
tcagatccggcctggc

SEQ ID NO: 5897 - DNA, 16 bp, Homo sapiens
gtctcctctcgcaacc

SEQ ID NO: 5898 - DNA, 18 bp, Homo sapiens
ttccttagcttccagcca

SEQ ID NO: 5899 - DNA, 16 bp, Homo sapiens
tttaagcgatctcctg

SEQ ID NO: 5900 - DNA, 16 bp, Homo sapiens
ccatttataacaggcc

SEQ ID NO: 5901 - DNA, 16 bp, Homo sapiens
ccgaatcacagattga

SEQ ID NO: 5902 - DNA, 16 bp, Homo sapiens
ggaccaagtgagcagc

SEQ ID NO: 5903 - DNA, 20 bp, Homo sapiens
tgagttttggtcagatgatc

SEQ ID NO: 5904 - DNA, 16 bp, Homo sapiens
gctgtgtggttaatat

SEQ ID NO: 5905 - DNA, 14 bp, Homo sapiens
aggttaccagccac

SEQ ID NO: 5906 - DNA, 16 bp, Homo sapiens
atatatgtggaggcaa

SEQ ID NO: 5907 - DNA, 16 bp, Homo sapiens
gcgcaagcacagactg

SEQ ID NO: 5908 - DNA, 14 bp, Homo sapiens
agttgaactgctag

SEQ ID NO: 5909 - DNA, 16 bp, Homo sapiens
ctccatactggccggc

SEQ ID NO: 5910 - DNA, 16 bp, Homo sapiens
ctgttggcaaacacgc

SEQ ID NO: 5911 - DNA, 16 bp, Homo sapiens
agtttattatagggct

SEQ ID NO: 5912 - DNA, 16 bp, Homo sapiens
tctcaatgaaagtctc

SEQ ID NO: 5913 - DNA, 16 bp, Homo sapiens
ccacaaatgagtagtt

SEQ ID NO: 5914 - DNA, 12 bp, Homo sapiens
tgtgtaaggtca

SEQ ID NO: 5915 - DNA, 16 bp, Homo sapiens
gaacaagctacatcaa

SEQ ID NO: 5916 - DNA, 16 bp, Homo sapiens
tagtcggttgtctgga

SEQ ID NO: 5917 - DNA, 16 bp, Homo sapiens
acagaattgttacaac

SEQ ID NO: 5918 - DNA, 18 bp, Homo sapiens
agttctcaaagacagtag

SEQ ID NO: 5919 - DNA, 18 bp, Homo sapiens
ctgaagatcgggccagcg

SEQ ID NO: 5920 - DNA, 16 bp, Homo sapiens
gccagctgggcactac

SEQ ID NO: 5921 - DNA, 16 bp, Homo sapiens
gtgaatatcaactgtt

SEQ ID NO: 5922 - DNA, 16 bp, Homo sapiens
gccaagaggcccgcct

SEQ ID NO: 5923 - DNA, 18 bp, Homo sapiens
gctccaatagtggtcagt

SEQ ID NO: 5924 - DNA, 14 bp, Homo sapiens
acatgtcagtaatt

SEQ ID NO: 5925 - DNA, 16 bp, Homo sapiens
cgggaagcaacatgaa

SEQ ID NO: 5926 - DNA, 16 bp, Homo sapiens
gtgactaagacaacca

SEQ ID NO: 5927 - DNA, 16 bp, Homo sapiens
gcacactgtggccaag

SEQ ID NO: 5928 - DNA, 16 bp, Homo sapiens
tgaatgacaggtgtgt

SEQ ID NO: 5929 - DNA, 20 bp, Homo sapiens
ctcccagcctcgctctgggt

SEQ ID NO: 5930 - DNA, 16 bp, Homo sapiens
ggcaattgtctctctt

SEQ ID NO: 5931 - DNA, 16 bp, Homo sapiens
gcttaagtgtgtaacg

SEQ ID NO: 5932 - DNA, 14 bp, Homo sapiens
tgatcagtaaggcc

SEQ ID NO: 5933 - DNA, 16 bp, Homo sapiens
gtccatgttggcgggc

SEQ ID NO: 5934 - DNA, 16 bp, Homo sapiens
ggcctcacggtcgccg

SEQ ID NO: 5935 - DNA, 16 bp, Homo sapiens
tcaggatggtgtcaag

SEQ ID NO: 5936 - DNA, 22 bp, Homo sapiens
ggtaatgagttcttccaactgg

SEQ ID NO: 5937 - DNA, 12 bp, Homo sapiens
caccttcaagtc

SEQ ID NO: 5938 - DNA, 20 bp, Homo sapiens
tgtgcactgaggagctgagg

SEQ ID NO: 5939 - DNA, 16 bp, Homo sapiens
tctcccctcccgttcc

SEQ ID NO: 5940 - DNA, 16 bp, Homo sapiens
caacaagtcagcccaa

SEQ ID NO: 5941 - DNA, 16 bp, Homo sapiens
agtcatccagcaatca

SEQ ID NO: 5942 - DNA, 16 bp, Homo sapiens
gccgagggagcaatac

SEQ ID NO: 5943 - DNA, 16 bp, Homo sapiens
agacacagggtaatgc

SEQ ID NO: 5944 - DNA, 25 bp, Homo sapiens
ttgcctccggttctgaaggtgttct

SEQ ID NO: 5945 - DNA, 16 bp, Homo sapiens
tgggaagttgatatac

SEQ ID NO: 5946 - DNA, 16 bp, Homo sapiens
tggcaaacacgctctg

SEQ ID NO: 5947 - DNA, 20 bp, Homo sapiens
gaaaggcaagtccagaggtg

SEQ ID NO: 5948 - DNA, 16 bp, Homo sapiens
cttaacgaggccagcc

SEQ ID NO: 5949 - DNA, 16 bp, Homo sapiens
tgacagtggtgctccc

SEQ ID NO: 5950 - DNA, 16 bp, Homo sapiens
tcataaatgtccagca

SEQ ID NO: 5951 - DNA, 16 bp, Homo sapiens
gacaaattgccactgg

SEQ ID NO: 5952 - DNA, 19 bp, Homo sapiens
gccaaacgacttccagcgt

SEQ ID NO: 5953 - DNA, 16 bp, Homo sapiens
ggtgacggaaccgctc

SEQ ID NO: 5954 - DNA, 16 bp, Homo sapiens
agtgatgggtccccac

SEQ ID NO: 5955 - DNA, 20 bp, Homo sapiens
tccacctttgcccaagtcat

SEQ ID NO: 5956 - DNA, 16 bp, Homo sapiens
ctgcagtgttcactcc

SEQ ID NO: 5957 - DNA, 16 bp, Homo sapiens
aacaagtaaatgtatc

SEQ ID NO: 5958 - DNA, 16 bp, Homo sapiens
ccacataacacagcca

SEQ ID NO: 5959 - DNA, 18 bp, Homo sapiens
attgatctggtcgcgctg

SEQ ID NO: 5960 - DNA, 16 bp, Homo sapiens
gttcaggcaggcggtt

SEQ ID NO: 5961 - DNA, 16 bp, Homo sapiens
attgaggtaagggtta

SEQ ID NO: 5962 - DNA, 16 bp, Homo sapiens
acatttgacggtttga

SEQ ID NO: 5963 - DNA, 21 bp, Homo sapiens
ggttggctttgtctttatttt

SEQ ID NO: 5964 - DNA, 20 bp, Homo sapiens
ttttaatagcctcataataa

SEQ ID NO: 5965 - DNA, 16 bp, Homo sapiens
gggatatacgcccacc

SEQ ID NO: 5966 - DNA, 20 bp, Homo sapiens
gggttgtagatgaccgtccc

SEQ ID NO: 5967 - DNA, 16 bp, Homo sapiens
ggtcgatgagggtcaa

SEQ ID NO: 5968 - DNA, 16 bp, Homo sapiens
cccaatggcaaatgct

SEQ ID NO: 5969 - DNA, 18 bp, Homo sapiens
cttcagcacgcacacggc

SEQ ID NO: 5970 - DNA, 15 bp, Homo sapiens
tagttcatcccagtg

SEQ ID NO: 5971 - DNA, 25 bp, Homo sapiens
cagcggtaatgagttcttccaactg

SEQ ID NO: 5972 - DNA, 20 bp, Homo sapiens
ctttgtactttcttcatttc

SEQ ID NO: 5973 - DNA, 16 bp, Homo sapiens
gggtaggcctgcgctc

SEQ ID NO: 5974 - DNA, 16 bp, Homo sapiens
tcatcaggctgatgtt

SEQ ID NO: 5975 - DNA, 16 bp, Homo sapiens
tgatttacaggcccaa

SEQ ID NO: 5976 - DNA, 16 bp, Homo sapiens
gctttaactcctagac

SEQ ID NO: 5977 - DNA, 16 bp, Homo sapiens
actttgccatatgcag

SEQ ID NO: 5978 - DNA, 16 bp, Homo sapiens
gagcaggcgggcagct

SEQ ID NO: 5979 - DNA, 16 bp, Homo sapiens
gcgcagagagagtcca

SEQ ID NO: 5980 - DNA, 18 bp, Homo sapiens
ttggccttgttctgctcg

SEQ ID NO: 5981 - DNA, 16 bp, Homo sapiens
ttaaacccccctctgg

SEQ ID NO: 5982 - DNA, 18 bp, Homo sapiens
ttgctgaagacgatgagg

SEQ ID NO: 5983 - DNA, 16 bp, Homo sapiens
gaaaatacgaaaccaa

SEQ ID NO: 5984 - DNA, 16 bp, Homo sapiens
tatcacagggtgtgct

SEQ ID NO: 5985 - DNA, 20 bp, Homo sapiens
gcacgggcacgttcacctca

SEQ ID NO: 5986 - DNA, 16 bp, Homo sapiens
ggccgtcacaactttt

SEQ ID NO: 5987 - DNA, 19 bp, Homo sapiens
taattttctagactttatg

SEQ ID NO: 5988 - DNA, 14 bp, Homo sapiens
gtagcgggtcctga

SEQ ID NO: 5989 - DNA, 14 bp, Homo sapiens
taaatcattgtcaa

SEQ ID NO: 5990 - DNA, 16 bp, Homo sapiens
gcaactacctttgtta

SEQ ID NO: 5991 - DNA, 18 bp, Homo sapiens
ctgttagccactgattaa

SEQ ID NO: 5992 - DNA, 16 bp, Homo sapiens
ggccgatggagctgaa

SEQ ID NO: 5993 - DNA, 14 bp, Homo sapiens
tagaatattgctct

SEQ ID NO: 5994 - DNA, 18 bp, Homo sapiens
tgctcgtacttgtagagg

SEQ ID NO: 5995 - DNA, 16 bp, Homo sapiens
ggtaattctgcaaaga

SEQ ID NO: 5996 - DNA, 16 bp, Homo sapiens
actgagccgtttttca

SEQ ID NO: 5997 - DNA, 16 bp, Homo sapiens
taaactttttggactt

SEQ ID NO: 5998 - DNA, 16 bp, Homo sapiens
atcttgattgaggtaa

SEQ ID NO: 5999 - DNA, 16 bp, Homo sapiens
gctcggctgggcggat

SEQ ID NO: 6000 - DNA, 16 bp, Homo sapiens
tctataaggttcctta

SEQ ID NO: 6001 - DNA, 16 bp, Homo sapiens
agtcgagcagggatgg

SEQ ID NO: 6002 - DNA, 16 bp, Homo sapiens
tggcaggaaacggtgc

SEQ ID NO: 6003 - DNA, 16 bp, Homo sapiens
ggctggatgtgagtgc

SEQ ID NO: 6004 - DNA, 18 bp, Homo sapiens
cctcagctgccaataccc

SEQ ID NO: 6005 - DNA, 20 bp, Homo sapiens
agaaaaagctcagttaactt

SEQ ID NO: 6006 - DNA, 16 bp, Homo sapiens
ctttcagcttgacgac

SEQ ID NO: 6007 - DNA, 18 bp, Homo sapiens
ctccttccatgactcaag

SEQ ID NO: 6008 - DNA, 16 bp, Homo sapiens
atataatgagcaactc

SEQ ID NO: 6009 - DNA, 18 bp, Homo sapiens
acacatttactcggctgt

SEQ ID NO: 6010 - DNA, 16 bp, Homo sapiens
tggctcggctgggcgg

SEQ ID NO: 6011 - DNA, 16 bp, Homo sapiens
catgtataagctcact

SEQ ID NO: 6012 - DNA, 16 bp, Homo sapiens
gggaccgcaatagaga

SEQ ID NO: 6013 - DNA, 16 bp, Homo sapiens
gcacactggtcgctaa

SEQ ID NO: 6014 - DNA, 12 bp, Homo sapiens
cagccttgtcga

SEQ ID NO: 6015 - DNA, 20 bp, Homo sapiens
caacatgcctctcttcatcc

SEQ ID NO: 6016 - DNA, 20 bp, Homo sapiens
ctggattttctccctgtagt

SEQ ID NO: 6017 - DNA, 16 bp, Homo sapiens
cttactggtacactgc

SEQ ID NO: 6018 - DNA, 16 bp, Homo sapiens
ttaaagagtaacaacc

SEQ ID NO: 6019 - DNA, 16 bp, Homo sapiens
aaccaaggtctgaact

SEQ ID NO: 6020 - DNA, 16 bp, Homo sapiens
tgccatgatcaggcgg

SEQ ID NO: 6021 - DNA, 16 bp, Homo sapiens
ggacaaagatgaaaaa

SEQ ID NO: 6022 - DNA, 16 bp, Homo sapiens
gggccgaaagttcttg

SEQ ID NO: 6023 - DNA, 16 bp, Homo sapiens
ttcaatgacatgctag

SEQ ID NO: 6024 - DNA, 14 bp, Homo sapiens
ttccttaagcttcc

SEQ ID NO: 6025 - DNA, 16 bp, Homo sapiens
gtagaaacagtgggct

SEQ ID NO: 6026 - DNA, 14 bp, Homo sapiens
catcagcaagaggc

SEQ ID NO: 6027 - DNA, 18 bp, Homo sapiens
tctggatcagagtcagtg

SEQ ID NO: 6028 - DNA, 16 bp, Homo sapiens
catgaaatgggaggac

SEQ ID NO: 6029 - DNA, 16 bp, Homo sapiens
cccaaaaccctgattc

SEQ ID NO: 6030 - DNA, 16 bp, Homo sapiens
ccttacttgggattca

SEQ ID NO: 6031 - DNA, 16 bp, Homo sapiens
tggacttgcagtgcaa

SEQ ID NO: 6032 - DNA, 18 bp, Homo sapiens
acggccgcgaacacgaag

SEQ ID NO: 6033 - DNA, 16 bp, Homo sapiens
gcctatccatgctgct

SEQ ID NO: 6034 - DNA, 20 bp, Homo sapiens
tttaatacccatctgtgatt

SEQ ID NO: 6035 - DNA, 16 bp, Homo sapiens
tgatgtaggactgctc

SEQ ID NO: 6036 - DNA, 14 bp, Homo sapiens
tcaagatcttcaca

SEQ ID NO: 6037 - DNA, 16 bp, Homo sapiens
ggcaacaggagacgcg

SEQ ID NO: 6038 - DNA, 16 bp, Homo sapiens
gtgcatctgtctggcc

SEQ ID NO: 6039 - DNA, 12 bp, Homo sapiens
ctcaccttcatg

SEQ ID NO: 6040 - DNA, 16 bp, Homo sapiens
tccgaactggccgaga

SEQ ID NO: 6041 - DNA, 16 bp, Homo sapiens
tactatcagtacagct

SEQ ID NO: 6042 - DNA, 16 bp, Homo sapiens
ggactgaaatagcaga

SEQ ID NO: 6043 - DNA, 16 bp, Homo sapiens
gcccccggagagctcc

SEQ ID NO: 6044 - DNA, 16 bp, Homo sapiens
ccgcacccacctcagg

SEQ ID NO: 6045 - DNA, 16 bp, Homo sapiens
cgtgacaccgcccctg

SEQ ID NO: 6046 - DNA, 16 bp, Homo sapiens
gccatgtgccggtagg

SEQ ID NO: 6047 - DNA, 15 bp, Homo sapiens
ctttcccaagcaatt

SEQ ID NO: 6048 - DNA, 16 bp, Homo sapiens
tgtatgctggacaccg

SEQ ID NO: 6049 - DNA, 16 bp, Homo sapiens
gtcaagggttctggtc

SEQ ID NO: 6050 - DNA, 16 bp, Homo sapiens
ggcaggatccactcat

SEQ ID NO: 6051 - DNA, 16 bp, Homo sapiens
gtgcccgcacttatag

SEQ ID NO: 6052 - DNA, 16 bp, Homo sapiens
tcggcacactttttta

SEQ ID NO: 6053 - DNA, 16 bp, Homo sapiens
gaattctggtctggct

SEQ ID NO: 6054 - DNA, 18 bp, Homo sapiens
ggataaatataggtcaag

SEQ ID NO: 6055 - DNA, 20 bp, Homo sapiens
aagtttgtgcagtattgtag

SEQ ID NO: 6056 - DNA, 16 bp, Homo sapiens
agcaactttagggaga

SEQ ID NO: 6057 - DNA, 20 bp, Homo sapiens
tatattcctaaaataatgct

SEQ ID NO: 6058 - DNA, 16 bp, Homo sapiens
cgccaaatgcccccac

SEQ ID NO: 6059 - DNA, 12 bp, Homo sapiens
aggtcaagtcta

SEQ ID NO: 6060 - DNA, 20 bp, Homo sapiens
tcttcttgatgtggccgaag

SEQ ID NO: 6061 - DNA, 16 bp, Homo sapiens
cagaaggcacccaggc

SEQ ID NO: 6062 - DNA, 16 bp, Homo sapiens
aactacaccgagaagg

SEQ ID NO: 6063 - DNA, 16 bp, Homo sapiens
cacacttcaaactcgg

SEQ ID NO: 6064 - DNA, 17 bp, Homo sapiens
aattttctagactttat

SEQ ID NO: 6065 - DNA, 16 bp, Homo sapiens
cgcccaagagaacaca

SEQ ID NO: 6066 - DNA, 20 bp, Homo sapiens
tcgtgagactagagagaagc

SEQ ID NO: 6067 - DNA, 18 bp, Homo sapiens
taaaacccgcaggatagt

SEQ ID NO: 6068 - DNA, 18 bp, Homo sapiens
ggcttgaagggtgggctg

SEQ ID NO: 6069 - DNA, 16 bp, Homo sapiens
acgaatgcatacaaat

SEQ ID NO: 6070 - DNA, 16 bp, Homo sapiens
gtagacacatgtcctt

SEQ ID NO: 6071 - DNA, 20 bp, Homo sapiens
cttaaaaactagttttataa

SEQ ID NO: 6072 - DNA, 29 bp, Homo sapiens
ccactcagagctcagatcttctaacttcc

SEQ ID NO: 6073 - DNA, 16 bp, Homo sapiens
attaaaatgggtctgc

SEQ ID NO: 6074 - DNA, 19 bp, Homo sapiens
cttcctggatggcttcaat

SEQ ID NO: 6075 - DNA, 20 bp, Homo sapiens
taactggtcagctgtggtaa

SEQ ID NO: 6076 - DNA, 20 bp, Homo sapiens
gtcgcccttcagcacgcaca

SEQ ID NO: 6077 - DNA, 16 bp, Homo sapiens
tgcctaactgtattga

SEQ ID NO: 6078 - DNA, 16 bp, Homo sapiens
cagtgactcggcagtc

SEQ ID NO: 6079 - DNA, 16 bp, Homo sapiens
gttcaggtcagagcct

SEQ ID NO: 6080 - DNA, 16 bp, Homo sapiens
ctgggcagagccgatc

SEQ ID NO: 6081 - DNA, 16 bp, Homo sapiens
gcgcactgccctgtcg

SEQ ID NO: 6082 - DNA, 16 bp, Homo sapiens
cccaaagcatagagta

SEQ ID NO: 6083 - DNA, 16 bp, Homo sapiens
ctgagaccacgagatc

SEQ ID NO: 6084 - DNA, 16 bp, Homo sapiens
atacgaggaaagttat

SEQ ID NO: 6085 - DNA, 16 bp, Homo sapiens
cccaagaagaccttgg

SEQ ID NO: 6086 - DNA, 16 bp, Homo sapiens
cgggccgaaagttctt

SEQ ID NO: 6087 - DNA, 16 bp, Homo sapiens
aagtcgagctccgccc

SEQ ID NO: 6088 - DNA, 16 bp, Homo sapiens
atcttaggcagaccct

SEQ ID NO: 6089 - DNA, 14 bp, Homo sapiens
tttttcttcgaatt

SEQ ID NO: 6090 - DNA, 16 bp, Homo sapiens
gcaagctactctctca

SEQ ID NO: 6091 - DNA, 16 bp, Homo sapiens
tgaggtaagggttact

SEQ ID NO: 6092 - DNA, 16 bp, Homo sapiens
gaagattttggccggg

SEQ ID NO: 6093 - DNA, 16 bp, Homo sapiens
tgcaatcacagacatc

SEQ ID NO: 6094 - DNA, 16 bp, Homo sapiens
gaatcaggagggagat

SEQ ID NO: 6095 - DNA, 18 bp, Homo sapiens
cgcatctgcttgatgaac

SEQ ID NO: 6096 - DNA, 26 bp, Homo sapiens
catcaaggaagatggcatttctagtt

SEQ ID NO: 6097 - DNA, 12 bp, Homo sapiens
ttgttccctcta

SEQ ID NO: 6098 - DNA, 16 bp, Homo sapiens
ggtcgccgcctcatcc

SEQ ID NO: 6099 - DNA, 16 bp, Homo sapiens
ttcagcttgacgacct

SEQ ID NO: 6100 - DNA, 16 bp, Homo sapiens
ttacatgagtctagga

SEQ ID NO: 6101 - DNA, 16 bp, Homo sapiens
gggattatgatgagga

SEQ ID NO: 6102 - DNA, 16 bp, Homo sapiens
tgccatgggtctggca

SEQ ID NO: 6103 - DNA, 20 bp, Homo sapiens
aaatcaaacacactgtgtcc

SEQ ID NO: 6104 - DNA, 16 bp, Homo sapiens
acgcacccggaagcag

SEQ ID NO: 6105 - DNA, 19 bp, Homo sapiens
tcaccctctgtgattttat

SEQ ID NO: 6106 - DNA, 15 bp, Homo sapiens
ctgctagcctctgga

SEQ ID NO: 6107 - DNA, 18 bp, Homo sapiens
gcgagtacaggatcttgt

SEQ ID NO: 6108 - DNA, 12 bp, Homo sapiens
agatggagcagt

SEQ ID NO: 6109 - DNA, 16 bp, Homo sapiens
tcaacaccttgagggc

SEQ ID NO: 6110 - DNA, 16 bp, Homo sapiens
ggcacacggctcaggg

SEQ ID NO: 6111 - DNA, 16 bp, Homo sapiens
atacccgggaggtcga

SEQ ID NO: 6112 - DNA, 20 bp, Homo sapiens
cctcttcttcttgatgtggc

SEQ ID NO: 6113 - DNA, 16 bp, Homo sapiens
atgtatctggttcaat

SEQ ID NO: 6114 - DNA, 14 bp, Homo sapiens
gcataaacagggtt

SEQ ID NO: 6115 - DNA, 16 bp, Homo sapiens
aggaactgagcttctc

SEQ ID NO: 6116 - DNA, 16 bp, Homo sapiens
ccgaggagtataggta

SEQ ID NO: 6117 - DNA, 16 bp, Homo sapiens
ctcctaacatgctaga

SEQ ID NO: 6118 - DNA, 18 bp, Homo sapiens
cactttcctgtgagccag

SEQ ID NO: 6119 - DNA, 16 bp, Homo sapiens
taatggtgggccggct

SEQ ID NO: 6120 - DNA, 16 bp, Homo sapiens
aagggaaacggcctgg

SEQ ID NO: 6121 - DNA, 16 bp, Homo sapiens
gcgcagtgggatcctc

SEQ ID NO: 6122 - DNA, 14 bp, Homo sapiens
aagctccttccact

SEQ ID NO: 6123 - DNA, 16 bp, Homo sapiens
ggtcaaactgagcgag

SEQ ID NO: 6124 - DNA, 16 bp, Homo sapiens
tcgaatgaagatggtc

SEQ ID NO: 6125 - DNA, 20 bp, Homo sapiens
ccatctgtgatttaagtctg

SEQ ID NO: 6126 - DNA, 16 bp, Homo sapiens
cgacagggtgtgtttc

SEQ ID NO: 6127 - DNA, 12 bp, Homo sapiens
ccgatgttgctg

SEQ ID NO: 6128 - DNA, 16 bp, Homo sapiens
accaagggccaacacc

SEQ ID NO: 6129 - DNA, 16 bp, Homo sapiens
aaagtaattcactgcg

SEQ ID NO: 6130 - DNA, 16 bp, Homo sapiens
tgctaatgggaagttg

SEQ ID NO: 6131 - DNA, 16 bp, Homo sapiens
aggttaatgcttcacc

SEQ ID NO: 6132 - DNA, 20 bp, Homo sapiens
gcctcataataagtgccata

SEQ ID NO: 6133 - DNA, 16 bp, Homo sapiens
gaagattatggtttcc

SEQ ID NO: 6134 - DNA, 19 bp, Homo sapiens
gcaacggaaaccccagacg

SEQ ID NO: 6135 - DNA, 15 bp, Homo sapiens
tagcctctggatttg

SEQ ID NO: 6136 - DNA, 16 bp, Homo sapiens
agggacacaacaggct

SEQ ID NO: 6137 - DNA, 16 bp, Homo sapiens
ggctatattcacaagg

SEQ ID NO: 6138 - DNA, 20 bp, Homo sapiens
gatgttaatagcgacaaagt

SEQ ID NO: 6139 - DNA, 16 bp, Homo sapiens
ctgtagccgttgctcc

SEQ ID NO: 6140 - DNA, 16 bp, Homo sapiens
ccacaagtcattccag

SEQ ID NO: 6141 - DNA, 16 bp, Homo sapiens
gcaaagagtgctagat

SEQ ID NO: 6142 - DNA, 16 bp, Homo sapiens
cccgagagcacgcccc

SEQ ID NO: 6143 - DNA, 16 bp, Homo sapiens
gtatataagacccggg

SEQ ID NO: 6144 - DNA, 16 bp, Homo sapiens
gcaaccagggtaaacg

SEQ ID NO: 6145 - DNA, 16 bp, Homo sapiens
ccacacgggttcagag

SEQ ID NO: 6146 - DNA, 16 bp, Homo sapiens
tacaatcattcccagc

SEQ ID NO: 6147 - DNA, 16 bp, Homo sapiens
cggcctcacggtcgcc

SEQ ID NO: 6148 - DNA, 16 bp, Homo sapiens
caatatcctggtgact

SEQ ID NO: 6149 - DNA, 16 bp, Homo sapiens
ttaggtattatggtat

SEQ ID NO: 6150 - DNA, 16 bp, Homo sapiens
gacaaacagatgaggc

SEQ ID NO: 6151 - DNA, 16 bp, Homo sapiens
gctgaaaggccagctc

SEQ ID NO: 6152 - DNA, 18 bp, Homo sapiens
atgtcgcctagtgttttc

SEQ ID NO: 6153 - DNA, 18 bp, Homo sapiens
gagctgagatgaagtcaa

SEQ ID NO: 6154 - DNA, 16 bp, Homo sapiens
atgaaagtctccactt

SEQ ID NO: 6155 - DNA, 16 bp, Homo sapiens
gctcaatgtcgatcag

SEQ ID NO: 6156 - DNA, 20 bp, Homo sapiens
gaaacctccatctcagccat

SEQ ID NO: 6157 - DNA, 16 bp, Homo sapiens
gcacctctggcagccg

SEQ ID NO: 6158 - DNA, 20 bp, Homo sapiens
tggttactgttggtatcata

SEQ ID NO: 6159 - DNA, 16 bp, Homo sapiens
caggacagtgactcgg

SEQ ID NO: 6160 - DNA, 16 bp, Homo sapiens
ccacacataggccata

SEQ ID NO: 6161 - DNA, 16 bp, Homo sapiens
agccgggcaccaccca

SEQ ID NO: 6162 - DNA, 16 bp, Homo sapiens
tggtagagtccccccc

SEQ ID NO: 6163 - DNA, 16 bp, Homo sapiens
tttcagcatgctttct

SEQ ID NO: 6164 - DNA, 16 bp, Homo sapiens
agtaatgatgagttcc

SEQ ID NO: 6165 - DNA, 16 bp, Homo sapiens
ttcaaactcggctctt

SEQ ID NO: 6166 - DNA, 17 bp, Homo sapiens
agttcatcccagtgaga

SEQ ID NO: 6167 - DNA, 16 bp, Homo sapiens
gtccaggccgggatgg

SEQ ID NO: 6168 - DNA, 16 bp, Homo sapiens
taacatgttactcaga

SEQ ID NO: 6169 - DNA, 16 bp, Homo sapiens
accttaagttttttgg

SEQ ID NO: 6170 - DNA, 16 bp, Homo sapiens
gtcaagttcaacactg

SEQ ID NO: 6171 - DNA, 16 bp, Homo sapiens
ggcctgcgctctgtgc

SEQ ID NO: 6172 - DNA, 20 bp, Homo sapiens
ggagcattaacttcacaatc

SEQ ID NO: 6173 - DNA, 16 bp, Homo sapiens
tgcgatatacctttct

SEQ ID NO: 6174 - DNA, 18 bp, Homo sapiens
atcaccttgtttccagcc

SEQ ID NO: 6175 - DNA, 16 bp, Homo sapiens
cccccctcgaggccta

SEQ ID NO: 6176 - DNA, 16 bp, Homo sapiens
ctggacaccggtcggc

SEQ ID NO: 6177 - DNA, 16 bp, Homo sapiens
gtccagttggccctga

SEQ ID NO: 6178 - DNA, 16 bp, Homo sapiens
ccaaaggagggccccc

SEQ ID NO: 6179 - DNA, 16 bp, Homo sapiens
ttgtatatatcagctc

SEQ ID NO: 6180 - DNA, 16 bp, Homo sapiens
accgatggtccgtagg

SEQ ID NO: 6181 - DNA, 16 bp, Homo sapiens
tctggccacgccttgc

SEQ ID NO: 6182 - DNA, 16 bp, Homo sapiens
gataaatactagaggc

SEQ ID NO: 6183 - DNA, 16 bp, Homo sapiens
tcatagcagaagaacc

SEQ ID NO: 6184 - DNA, 16 bp, Homo sapiens
ggtacctaacaggtct

SEQ ID NO: 6185 - DNA, 16 bp, Homo sapiens
gcaaatgctggctacg

SEQ ID NO: 6186 - DNA, 20 bp, Homo sapiens
ttatatatgacagttgcttg

SEQ ID NO: 6187 - DNA, 16 bp, Homo sapiens
gcctgtgggtttttga

SEQ ID NO: 6188 - DNA, 16 bp, Homo sapiens
tggagagggttctctg

SEQ ID NO: 6189 - DNA, 16 bp, Homo sapiens
ggttactttgccatat

SEQ ID NO: 6190 - DNA, 20 bp, Homo sapiens
tcagcaccaagcaggtcata

SEQ ID NO: 6191 - DNA, 16 bp, Homo sapiens
taggaactgagcttac

SEQ ID NO: 6192 - DNA, 16 bp, Homo sapiens
ggctgggcggataatg

SEQ ID NO: 6193 - DNA, 16 bp, Homo sapiens
ctcaacgacctggccc

SEQ ID NO: 6194 - DNA, 16 bp, Homo sapiens
ccgccgccgaccctca

SEQ ID NO: 6195 - DNA, 20 bp, Homo sapiens
tggaagtcttccccgtccat

SEQ ID NO: 6196 - DNA, 20 bp, Homo sapiens
aattgatgatgccctgcact

SEQ ID NO: 6197 - DNA, 12 bp, Homo sapiens
gatgcccctcgc

SEQ ID NO: 6198 - DNA, 16 bp, Homo sapiens
agctgttgtgcagtgc

SEQ ID NO: 6199 - DNA, 16 bp, Homo sapiens
cactatgcggccacca

SEQ ID NO: 6200 - DNA, 16 bp, Homo sapiens
tcacagggccccctca

SEQ ID NO: 6201 - DNA, 16 bp, Homo sapiens
ctgctcaatgtcgatc

SEQ ID NO: 6202 - DNA, 16 bp, Homo sapiens
gggaaacctagcaagc

SEQ ID NO: 6203 - DNA, 16 bp, Homo sapiens
gattaatctgggcagt

SEQ ID NO: 6204 - DNA, 16 bp, Homo sapiens
tcctatcggtatatga

SEQ ID NO: 6205 - DNA, 16 bp, Homo sapiens
agtaagacagggtaac

SEQ ID NO: 6206 - DNA, 20 bp, Homo sapiens
tgtactttcttcatttccac

SEQ ID NO: 6207 - DNA, 16 bp, Homo sapiens
agcaatcacgctgcca

SEQ ID NO: 6208 - DNA, 16 bp, Homo sapiens
caaggagcccacaagg

SEQ ID NO: 6209 - DNA, 16 bp, Homo sapiens
tcccaaatgcagacgc

SEQ ID NO: 6210 - DNA, 16 bp, Homo sapiens
agttagtggacttgat

SEQ ID NO: 6211 - DNA, 16 bp, Homo sapiens
atctccccctgattgg

SEQ ID NO: 6212 - DNA, 14 bp, Homo sapiens
tttccaccttggat

SEQ ID NO: 6213 - DNA, 20 bp, Homo sapiens
agtcacacaattacactttt

SEQ ID NO: 6214 - DNA, 18 bp, Homo sapiens
tcatacacaggtcctaag

SEQ ID NO: 6215 - DNA, 16 bp, Homo sapiens
gcggtgtccagccagg

SEQ ID NO: 6216 - DNA, 20 bp, Homo sapiens
gcagctccccgttcacgttc

SEQ ID NO: 6217 - DNA, 14 bp, Homo sapiens
cagatcttgtcaag

SEQ ID NO: 6218 - DNA, 16 bp, Homo sapiens
cagcttgacgacctgc

SEQ ID NO: 6219 - DNA, 16 bp, Homo sapiens
cgagagcacgcccccc

SEQ ID NO: 6220 - DNA, 18 bp, Homo sapiens
tgagaaactgttcagctt

SEQ ID NO: 6221 - DNA, 16 bp, Homo sapiens
gtctgtagccgttgct

SEQ ID NO: 6222 - DNA, 16 bp, Homo sapiens
acagtgactcggcagt

SEQ ID NO: 6223 - DNA, 14 bp, Homo sapiens
ttcgcatccgtcta

SEQ ID NO: 6224 - DNA, 12 bp, Homo sapiens
gccggagactga

SEQ ID NO: 6225 - DNA, 16 bp, Homo sapiens
ggacaccggtcggcgc

SEQ ID NO: 6226 - DNA, 20 bp, Homo sapiens
cacattgcccaagtctccaa

SEQ ID NO: 6227 - DNA, 16 bp, Homo sapiens
caagggtacagactta

SEQ ID NO: 6228 - DNA, 16 bp, Homo sapiens
gcaaaccaaagatggg

SEQ ID NO: 6229 - DNA, 16 bp, Homo sapiens
accctcaagtctcctg

SEQ ID NO: 6230 - DNA, 16 bp, Homo sapiens
gtctattggcacacag

SEQ ID NO: 6231 - DNA, 15 bp, Homo sapiens
ctgactgtgtactca

SEQ ID NO: 6232 - DNA, 20 bp, Homo sapiens
gtggagcagctgctgctgct

SEQ ID NO: 6233 - DNA, 15 bp, Homo sapiens
gctagcctctggatt

SEQ ID NO: 6234 - DNA, 16 bp, Homo sapiens
taatccctttccgtca

SEQ ID NO: 6235 - DNA, 16 bp, Homo sapiens
cgctcctcgcccgccg

SEQ ID NO: 6236 - DNA, 16 bp, Homo sapiens
gcaatagggaagagct

SEQ ID NO: 6237 - DNA, 16 bp, Homo sapiens
ctcttagcatggcccc

SEQ ID NO: 6238 - DNA, 16 bp, Homo sapiens
aattaggtgggtaaag

SEQ ID NO: 6239 - DNA, 16 bp, Homo sapiens
ttccggtgagcacacc

SEQ ID NO: 6240 - DNA, 20 bp, Homo sapiens
tgagtcataaccagcctggc

SEQ ID NO: 6241 - DNA, 16 bp, Homo sapiens
gctgctattagaatgc

SEQ ID NO: 6242 - DNA, 16 bp, Homo sapiens
tttggttccatatcct

SEQ ID NO: 6243 - DNA, 20 bp, Homo sapiens
gggagctcgttaactatgct

SEQ ID NO: 6244 - DNA, 16 bp, Homo sapiens
cctcggtatttattgt

SEQ ID NO: 6245 - DNA, 20 bp, Homo sapiens
ggacattcgggaaggtgcgc

SEQ ID NO: 6246 - DNA, 16 bp, Homo sapiens
ctgtcggacattcggg

SEQ ID NO: 6247 - DNA, 17 bp, Homo sapiens
agttcacaaccgctccg

SEQ ID NO: 6248 - DNA, 17 bp, Homo sapiens
tcctcggtatttattgt

SEQ ID NO: 6249 - DNA, 16 bp, Homo sapiens
cctggcggagattgtc

SEQ ID NO: 6250 - DNA, 16 bp, Homo sapiens
tgtcggacattcggga

SEQ ID NO: 6251 - DNA, 20 bp, Homo sapiens
tgaagaggggcgaggtgtcg

SEQ ID NO: 6252 - DNA, 20 bp, Homo sapiens
gaagaggggcgaggtgtcgt

SEQ ID NO: 6253 - DNA, 20 bp, Homo sapiens
aagaggggcgaggtgtcgtg

SEQ ID NO: 6254 - DNA, 20 bp, Homo sapiens
agaggggcgaggtgtcgtgc

SEQ ID NO: 6255 - DNA, 20 bp, Homo sapiens
gaggggcgaggtgtcgtgct

SEQ ID NO: 6256 - DNA, 20 bp, Homo sapiens
aggggcgaggtgtcgtgctt

SEQ ID NO: 6257 - DNA, 20 bp, Homo sapiens
ggggcgaggtgtcgtgcttc

SEQ ID NO: 6258 - DNA, 20 bp, Homo sapiens
gggcgaggtgtcgtgcttcc

SEQ ID NO: 6259 - DNA, 20 bp, Homo sapiens
ggcgaggtgtcgtgcttccg

SEQ ID NO: 6260 - DNA, 20 bp, Homo sapiens
gcgaggtgtcgtgcttccgt

SEQ ID NO: 6261 - DNA, 20 bp, Homo sapiens
cgaggtgtcgtgcttccgtg

SEQ ID NO: 6262 - DNA, 20 bp, Homo sapiens
gaggtgtcgtgcttccgtga

SEQ ID NO: 6263 - DNA, 20 bp, Homo sapiens
aggtgtcgtgcttccgtgag

SEQ ID NO: 6264 - DNA, 20 bp, Homo sapiens
ggtgtcgtgcttccgtgagg

SEQ ID NO: 6265 - DNA, 20 bp, Homo sapiens
gtgtcgtgcttccgtgagga

SEQ ID NO: 6266 - DNA, 20 bp, Homo sapiens
tgtcgtgcttccgtgaggag

SEQ ID NO: 6267 - DNA, 20 bp, Homo sapiens
gtcgtgcttccgtgaggaga

SEQ ID NO: 6268 - DNA, 20 bp, Homo sapiens
tcgtgcttccgtgaggagag

SEQ ID NO: 6269 - DNA, 20 bp, Homo sapiens
cgtgcttccgtgaggagagg

SEQ ID NO: 6270 - DNA, 20 bp, Homo sapiens
gtgcttccgtgaggagaggg

SEQ ID NO: 6271 - DNA, 20 bp, Homo sapiens
tgcttccgtgaggagaggga

SEQ ID NO: 6272 - DNA, 20 bp, Homo sapiens
gcttccgtgaggagagggac

SEQ ID NO: 6273 - DNA, 20 bp, Homo sapiens
cttccgtgaggagagggacg

SEQ ID NO: 6274 - DNA, 20 bp, Homo sapiens
cgtgttggtgaatggggacc

SEQ ID NO: 6275 - DNA, 20 bp, Homo sapiens
gtgttggtgaatggggaccg

SEQ ID NO: 6276 - DNA, 20 bp, Homo sapiens
tgttggtgaatggggaccgg

SEQ ID NO: 6277 - DNA, 20 bp, Homo sapiens
gttggtgaatggggaccggc

SEQ ID NO: 6278 - DNA, 20 bp, Homo sapiens
ttggtgaatggggaccggcg

SEQ ID NO: 6279 - DNA, 20 bp, Homo sapiens
tggtgaatggggaccggcgg

SEQ ID NO: 6280 - DNA, 20 bp, Homo sapiens
ggtgaatggggaccggcggt

SEQ ID NO: 6281 - DNA, 20 bp, Homo sapiens
gtgaatggggaccggcggtg

SEQ ID NO: 6282 - DNA, 20 bp, Homo sapiens
tgaatggggaccggcggtgg

SEQ ID NO: 6283 - DNA, 20 bp, Homo sapiens
gaatggggaccggcggtgga

SEQ ID NO: 6284 - DNA, 20 bp, Homo sapiens
aatggggaccggcggtggat

SEQ ID NO: 6285 - DNA, 20 bp, Homo sapiens
atggggaccggcggtggatc

SEQ ID NO: 6286 - DNA, 20 bp, Homo sapiens
tggggaccggcggtggatca

SEQ ID NO: 6287 - DNA, 20 bp, Homo sapiens
ggggaccggcggtggatcac

SEQ ID NO: 6288 - DNA, 20 bp, Homo sapiens
gggaccggcggtggatcacg

SEQ ID NO: 6289 - DNA, 20 bp, Homo sapiens
ttcgccttccaggatgagaa

SEQ ID NO: 6290 - DNA, 20 bp, Homo sapiens
tcgccttccaggatgagaac

SEQ ID NO: 6291 - DNA, 20 bp, Homo sapiens
cgccttccaggatgagaact

SEQ ID NO: 6292 - DNA, 20 bp, Homo sapiens
ccttccaggatgagaactac

SEQ ID NO: 6293 - DNA, 20 bp, Homo sapiens
cttccaggatgagaactacc

SEQ ID NO: 6294 - DNA, 20 bp, Homo sapiens
ttccaggatgagaactacct

SEQ ID NO: 6295 - DNA, 20 bp, Homo sapiens
tccaggatgagaactacctg

SEQ ID NO: 6296 - DNA, 20 bp, Homo sapiens
caggatgagaactacctgta

SEQ ID NO: 6297 - DNA, 20 bp, Homo sapiens
aggatgagaactacctgtac

SEQ ID NO: 6298 - DNA, 20 bp, Homo sapiens
ggatgagaactacctgtacc

SEQ ID NO: 6299 - DNA, 20 bp, Homo sapiens
gatgagaactacctgtacct

SEQ ID NO: 6300 - DNA, 20 bp, Homo sapiens
tgagaactacctgtacctgg

SEQ ID NO: 6301 - DNA, 20 bp, Homo sapiens
gagaactacctgtacctggt

SEQ ID NO: 6302 - DNA, 20 bp, Homo sapiens
agaactacctgtacctggtc

SEQ ID NO: 6303 - DNA, 20 bp, Homo sapiens
gaactacctgtacctggtca

SEQ ID NO: 6304 - DNA, 20 bp, Homo sapiens
actacctgtacctggtcatg

SEQ ID NO: 6305 - DNA, 20 bp, Homo sapiens
ctacctgtacctggtcatgg

SEQ ID NO: 6306 - DNA, 20 bp, Homo sapiens
tacctgtacctggtcatgga

SEQ ID NO: 6307 - DNA, 20 bp, Homo sapiens
acctgtacctggtcatggag

SEQ ID NO: 6308 - DNA, 20 bp, Homo sapiens
cctgtacctggtcatggagt

SEQ ID NO: 6309 - DNA, 20 bp, Homo sapiens
ctgtacctggtcatggagta

SEQ ID NO: 6310 - DNA, 20 bp, Homo sapiens
tgtacctggtcatggagtat

SEQ ID NO: 6311 - DNA, 20 bp, Homo sapiens
gtacctggtcatggagtatt

SEQ ID NO: 6312 - DNA, 20 bp, Homo sapiens
tacctggtcatggagtatta

SEQ ID NO: 6313 - DNA, 20 bp, Homo sapiens
cctggtcatggagtattacg

SEQ ID NO: 6314 - DNA, 20 bp, Homo sapiens
ggggacctgctgacactgct

SEQ ID NO: 6315 - DNA, 20 bp, Homo sapiens
gggacctgctgacactgctg

SEQ ID NO: 6316 - DNA, 20 bp, Homo sapiens
ggacctgctgacactgctga

SEQ ID NO: 6317 - DNA, 20 bp, Homo sapiens
gacctgctgacactgctgag

SEQ ID NO: 6318 - DNA, 20 bp, Homo sapiens
acctgctgacactgctgagc

SEQ ID NO: 6319 - DNA, 20 bp, Homo sapiens
cctgctgacactgctgagca

SEQ ID NO: 6320 - DNA, 20 bp, Homo sapiens
ctgctgacactgctgagcaa

SEQ ID NO: 6321 - DNA, 20 bp, Homo sapiens
tgctgacactgctgagcaag

SEQ ID NO: 6322 - DNA, 20 bp, Homo sapiens
gctgacactgctgagcaagt

SEQ ID NO: 6323 - DNA, 20 bp, Homo sapiens
ctgacactgctgagcaagtt

SEQ ID NO: 6324 - DNA, 20 bp, Homo sapiens
tgacactgctgagcaagttt

SEQ ID NO: 6325 - DNA, 20 bp, Homo sapiens
gacactgctgagcaagtttg

SEQ ID NO: 6326 - DNA, 20 bp, Homo sapiens
acactgctgagcaagtttgg

SEQ ID NO: 6327 - DNA, 20 bp, Homo sapiens
cactgctgagcaagtttggg

SEQ ID NO: 6328 - DNA, 20 bp, Homo sapiens
ttggtggaggacgggctcac

SEQ ID NO: 6329 - DNA, 20 bp, Homo sapiens
tggtggaggacgggctcact

SEQ ID NO: 6330 - DNA, 20 bp, Homo sapiens
ggtggaggacgggctcactg

SEQ ID NO: 6331 - DNA, 20 bp, Homo sapiens
gtggaggacgggctcactgc

SEQ ID NO: 6332 - DNA, 20 bp, Homo sapiens
tggaggacgggctcactgcc

SEQ ID NO: 6333 - DNA, 20 bp, Homo sapiens
ggaggacgggctcactgcca

SEQ ID NO: 6334 - DNA, 20 bp, Homo sapiens
aggacgggctcactgccatg

SEQ ID NO: 6335 - DNA, 20 bp, Homo sapiens
ggacgggctcactgccatgg

SEQ ID NO: 6336 - DNA, 20 bp, Homo sapiens
gacgggctcactgccatgga

SEQ ID NO: 6337 - DNA, 20 bp, Homo sapiens
acgggctcactgccatggag

SEQ ID NO: 6338 - DNA, 20 bp, Homo sapiens
cgggctcactgccatggaga

SEQ ID NO: 6339 - DNA, 20 bp, Homo sapiens
gggctcactgccatggagac

SEQ ID NO: 6340 - DNA, 20 bp, Homo sapiens
ctgtcggacattcgggaagg

SEQ ID NO: 6341 - DNA, 20 bp, Homo sapiens
tgtcggacattcgggaaggt

SEQ ID NO: 6342 - DNA, 20 bp, Homo sapiens
gtcggacattcgggaaggtg

SEQ ID NO: 6343 - DNA, 20 bp, Homo sapiens
tcggacattcgggaaggtgc

SEQ ID NO: 6344 - DNA, 20 bp, Homo sapiens
cggacattcgggaaggtgcg

SEQ ID NO: 6345 - DNA, 20 bp, Homo sapiens
gacattcgggaaggtgcgcc

SEQ ID NO: 6346 - DNA, 20 bp, Homo sapiens
ggggtccacctgccttttgt

SEQ ID NO: 6347 - DNA, 20 bp, Homo sapiens
gggtccacctgccttttgtg

SEQ ID NO: 6348 - DNA, 20 bp, Homo sapiens
ggtccacctgccttttgtgg

SEQ ID NO: 6349 - DNA, 20 bp, Homo sapiens
gtccacctgccttttgtggg

SEQ ID NO: 6350 - DNA, 20 bp, Homo sapiens
tccacctgccttttgtgggc

SEQ ID NO: 6351 - DNA, 20 bp, Homo sapiens
ccacctgccttttgtgggct

SEQ ID NO: 6352 - DNA, 20 bp, Homo sapiens
cacctgccttttgtgggcta

SEQ ID NO: 6353 - DNA, 20 bp, Homo sapiens
acctgccttttgtgggctac

SEQ ID NO: 6354 - DNA, 20 bp, Homo sapiens
cctgccttttgtgggctact

SEQ ID NO: 6355 - DNA, 20 bp, Homo sapiens
ctgccttttgtgggctactc

SEQ ID NO: 6356 - DNA, 20 bp, Homo sapiens
tgccttttgtgggctactcc

SEQ ID NO: 6357 - DNA, 20 bp, Homo sapiens
gccttttgtgggctactcct

SEQ ID NO: 6358 - DNA, 20 bp, Homo sapiens
ccttttgtgggctactccta

SEQ ID NO: 6359 - DNA, 20 bp, Homo sapiens
cttttgtgggctactcctac

SEQ ID NO: 6360 - DNA, 20 bp, Homo sapiens
ttttgtgggctactcctact

SEQ ID NO: 6361 - DNA, 20 bp, Homo sapiens
tttgtgggctactcctactc

SEQ ID NO: 6362 - DNA, 20 bp, Homo sapiens
ttgtgggctactcctactcc

SEQ ID NO: 6363 - DNA, 20 bp, Homo sapiens
tgtgggctactcctactcct

SEQ ID NO: 6364 - DNA, 20 bp, Homo sapiens
gtgggctactcctactcctg

SEQ ID NO: 6365 - DNA, 20 bp, Homo sapiens
tgggctactcctactcctgc

SEQ ID NO: 6366 - DNA, 20 bp, Homo sapiens
gggctactcctactcctgca

SEQ ID NO: 6367 - DNA, 20 bp, Homo sapiens
ggctactcctactcctgcat

SEQ ID NO: 6368 - DNA, 20 bp, Homo sapiens
gctactcctactcctgcatg

SEQ ID NO: 6369 - DNA, 20 bp, Homo sapiens
ctactcctactcctgcatgg

SEQ ID NO: 6370 - DNA, 20 bp, Homo sapiens
tactcctactcctgcatggc

SEQ ID NO: 6371 - DNA, 20 bp, Homo sapiens
actcctactcctgcatggcc

SEQ ID NO: 6372 - DNA, 20 bp, Homo sapiens
ctcctactcctgcatggccc

SEQ ID NO: 6373 - DNA, 20 bp, Homo sapiens
tcctactcctgcatggccct

SEQ ID NO: 6374 - DNA, 20 bp, Homo sapiens
cctactcctgcatggccctc

SEQ ID NO: 6375 - DNA, 20 bp, Homo sapiens
tactcctgcatggccctcag

SEQ ID NO: 6376 - DNA, 20 bp, Homo sapiens
actcctgcatggccctcagg

SEQ ID NO: 6377 - DNA, 20 bp, Homo sapiens
ctcctgcatggccctcaggg

SEQ ID NO: 6378 - DNA, 20 bp, Homo sapiens
tcctgcatggccctcaggga

SEQ ID NO: 6379 - DNA, 20 bp, Homo sapiens
cctgcatggccctcagggac

SEQ ID NO: 6380 - DNA, 20 bp, Homo sapiens
ctgcatggccctcagggaca

SEQ ID NO: 6381 - DNA, 20 bp, Homo sapiens
tgcatggccctcagggacag

SEQ ID NO: 6382 - DNA, 20 bp, Homo sapiens
gcatggccctcagggacagt

SEQ ID NO: 6383 - DNA, 20 bp, Homo sapiens
catggccctcagggacagtg

SEQ ID NO: 6384 - DNA, 20 bp, Homo sapiens
atggccctcagggacagtga

SEQ ID NO: 6385 - DNA, 20 bp, Homo sapiens
tggccctcagggacagtgag

SEQ ID NO: 6386 - DNA, 20 bp, Homo sapiens
ggccctcagggacagtgagg

SEQ ID NO: 6387 - DNA, 20 bp, Homo sapiens
gccctcagggacagtgaggt

SEQ ID NO: 6388 - DNA, 20 bp, Homo sapiens
ccctcagggacagtgaggtc

SEQ ID NO: 6389 - DNA, 20 bp, Homo sapiens
cctcagggacagtgaggtcc

SEQ ID NO: 6390 - DNA, 20 bp, Homo sapiens
ctcagggacagtgaggtccc

SEQ ID NO: 6391 - DNA, 20 bp, Homo sapiens
cacacccatggaactggagg

SEQ ID NO: 6392 - DNA, 20 bp, Homo sapiens
acacccatggaactggaggc

SEQ ID NO: 6393 - DNA, 20 bp, Homo sapiens
cacccatggaactggaggcc

SEQ ID NO: 6394 - DNA, 20 bp, Homo sapiens
acccatggaactggaggccg

SEQ ID NO: 6395 - DNA, 20 bp, Homo sapiens
cccatggaactggaggccga

SEQ ID NO: 6396 - DNA, 20 bp, Homo sapiens
ccatggaactggaggccgag

SEQ ID NO: 6397 - DNA, 20 bp, Homo sapiens
catggaactggaggccgagc

SEQ ID NO: 6398 - DNA, 20 bp, Homo sapiens
atggaactggaggccgagca

SEQ ID NO: 6399 - DNA, 20 bp, Homo sapiens
tggaactggaggccgagcag

SEQ ID NO: 6400 - DNA, 20 bp, Homo sapiens
ggaactggaggccgagcagc

SEQ ID NO: 6401 - DNA, 20 bp, Homo sapiens
gaactggaggccgagcagct

SEQ ID NO: 6402 - DNA, 20 bp, Homo sapiens
aactggaggccgagcagctg

SEQ ID NO: 6403 - DNA, 20 bp, Homo sapiens
actggaggccgagcagctgc

SEQ ID NO: 6404 - DNA, 20 bp, Homo sapiens
ctggaggccgagcagctgct

SEQ ID NO: 6405 - DNA, 20 bp, Homo sapiens
tggaggccgagcagctgctt

SEQ ID NO: 6406 - DNA, 20 bp, Homo sapiens
ggaggccgagcagctgcttg

SEQ ID NO: 6407 - DNA, 20 bp, Homo sapiens
gaggccgagcagctgcttga

SEQ ID NO: 6408 - DNA, 20 bp, Homo sapiens
aggccgagcagctgcttgag

SEQ ID NO: 6409 - DNA, 20 bp, Homo sapiens
ggccgagcagctgcttgagc

SEQ ID NO: 6410 - DNA, 20 bp, Homo sapiens
gccgagcagctgcttgagcc

SEQ ID NO: 6411 - DNA, 20 bp, Homo sapiens
ccgagcagctgcttgagcca

SEQ ID NO: 6412 - DNA, 20 bp, Homo sapiens
cgagcagctgcttgagccac

SEQ ID NO: 6413 - DNA, 20 bp, Homo sapiens
gagcagctgcttgagccaca

SEQ ID NO: 6414 - DNA, 20 bp, Homo sapiens
agcagctgcttgagccacac

SEQ ID NO: 6415 - DNA, 20 bp, Homo sapiens
ggatgaaacagctgaagtgg

SEQ ID NO: 6416 - DNA, 20 bp, Homo sapiens
atgaaacagctgaagtggca

SEQ ID NO: 6417 - DNA, 20 bp, Homo sapiens
tgaaacagctgaagtggcag

SEQ ID NO: 6418 - DNA, 20 bp, Homo sapiens
gaaacagctgaagtggcagt

SEQ ID NO: 6419 - DNA, 20 bp, Homo sapiens
aaacagctgaagtggcagtt

SEQ ID NO: 6420 - DNA, 20 bp, Homo sapiens
aacagctgaagtggcagttc

SEQ ID NO: 6421 - DNA, 20 bp, Homo sapiens
acagctgaagtggcagttcc

SEQ ID NO: 6422 - DNA, 20 bp, Homo sapiens
cagctgaagtggcagttcca

SEQ ID NO: 6423 - DNA, 20 bp, Homo sapiens
agctgaagtggcagttccag

SEQ ID NO: 6424 - DNA, 20 bp, Homo sapiens
gctgaagtggcagttccagc

SEQ ID NO: 6425 - DNA, 20 bp, Homo sapiens
ctgaagtggcagttccagcg

SEQ ID NO: 6426 - DNA, 20 bp, Homo sapiens
tgaagtggcagttccagcgg

SEQ ID NO: 6427 - DNA, 20 bp, Homo sapiens
gaagtggcagttccagcggc

SEQ ID NO: 6428 - DNA, 20 bp, Homo sapiens
aagtggcagttccagcggct

SEQ ID NO: 6429 - DNA, 20 bp, Homo sapiens
tccctgcggcagaggctgag

SEQ ID NO: 6430 - DNA, 20 bp, Homo sapiens
ccctgcggcagaggctgagg

SEQ ID NO: 6431 - DNA, 20 bp, Homo sapiens
ctgcggcagaggctgaggcc

SEQ ID NO: 6432 - DNA, 20 bp, Homo sapiens
tgcggcagaggctgaggccg

SEQ ID NO: 6433 - DNA, 20 bp, Homo sapiens
gcggcagaggctgaggccga

SEQ ID NO: 6434 - DNA, 20 bp, Homo sapiens
cggcagaggctgaggccgag

SEQ ID NO: 6435 - DNA, 20 bp, Homo sapiens
ggcagaggctgaggccgagg

SEQ ID NO: 6436 - DNA, 20 bp, Homo sapiens
gcagaggctgaggccgaggt

SEQ ID NO: 6437 - DNA, 20 bp, Homo sapiens
cagaggctgaggccgaggtg

SEQ ID NO: 6438 - DNA, 20 bp, Homo sapiens
agaggctgaggccgaggtga

SEQ ID NO: 6439 - DNA, 20 bp, Homo sapiens
gaggctgaggccgaggtgac

SEQ ID NO: 6440 - DNA, 20 bp, Homo sapiens
aggctgaggccgaggtgacg

SEQ ID NO: 6441 - DNA, 20 bp, Homo sapiens
gccctggaggaggaggtgct

SEQ ID NO: 6442 - DNA, 20 bp, Homo sapiens
ccctggaggaggaggtgctc

SEQ ID NO: 6443 - DNA, 20 bp, Homo sapiens
cctggaggaggaggtgctca

SEQ ID NO: 6444 - DNA, 20 bp, Homo sapiens
ctggaggaggaggtgctcac

SEQ ID NO: 6445 - DNA, 20 bp, Homo sapiens
tggaggaggaggtgctcacc

SEQ ID NO: 6446 - DNA, 20 bp, Homo sapiens
ggaggaggaggtgctcaccc

SEQ ID NO: 6447 - DNA, 20 bp, Homo sapiens
gaggaggaggtgctcacccg

SEQ ID NO: 6448 - DNA, 20 bp, Homo sapiens
aggaggaggtgctcacccgg

SEQ ID NO: 6449 - DNA, 20 bp, Homo sapiens
ggaggaggtgctcacccggc

SEQ ID NO: 6450 - DNA, 20 bp, Homo sapiens
gaggaggtgctcacccggca

SEQ ID NO: 6451 - DNA, 20 bp, Homo sapiens
aggaggtgctcacccggcag

SEQ ID NO: 6452 - DNA, 20 bp, Homo sapiens
ggaggtgctcacccggcaga

SEQ ID NO: 6453 - DNA, 20 bp, Homo sapiens
aggtgctcacccggcagagc

SEQ ID NO: 6454 - DNA, 20 bp, Homo sapiens
ggtgctcacccggcagagcc

SEQ ID NO: 6455 - DNA, 20 bp, Homo sapiens
gtgctcacccggcagagcct

SEQ ID NO: 6456 - DNA, 20 bp, Homo sapiens
tgctcacccggcagagcctg

SEQ ID NO: 6457 - DNA, 20 bp, Homo sapiens
gctcacccggcagagcctga

SEQ ID NO: 6458 - DNA, 20 bp, Homo sapiens
tcacccggcagagcctgagc

SEQ ID NO: 6459 - DNA, 20 bp, Homo sapiens
acccggcagagcctgagccg

SEQ ID NO: 6460 - DNA, 20 bp, Homo sapiens
cccggcagagcctgagccgg

SEQ ID NO: 6461 - DNA, 20 bp, Homo sapiens
ccggcagagcctgagccggg

SEQ ID NO: 6462 - DNA, 20 bp, Homo sapiens
cggcagagcctgagccggga

SEQ ID NO: 6463 - DNA, 20 bp, Homo sapiens
ggcagagcctgagccgggag

SEQ ID NO: 6464 - DNA, 20 bp, Homo sapiens
gcagagcctgagccgggaga

SEQ ID NO: 6465 - DNA, 20 bp, Homo sapiens
cagagcctgagccgggagat

SEQ ID NO: 6466 - DNA, 20 bp, Homo sapiens
agagcctgagccgggagatg

SEQ ID NO: 6467 - DNA, 20 bp, Homo sapiens
gagcctgagccgggagatgg

SEQ ID NO: 6468 - DNA, 20 bp, Homo sapiens
agcctgagccgggagatgga

SEQ ID NO: 6469 - DNA, 20 bp, Homo sapiens
gcctgagccgggagatggag

SEQ ID NO: 6470 - DNA, 20 bp, Homo sapiens
cctgagccgggagatggagg

SEQ ID NO: 6471 - DNA, 20 bp, Homo sapiens
ctgagccgggagatggaggc

SEQ ID NO: 6472 - DNA, 20 bp, Homo sapiens
tgagccgggagatggaggcc

SEQ ID NO: 6473 - DNA, 20 bp, Homo sapiens
gagccgggagatggaggcca

SEQ ID NO: 6474 - DNA, 20 bp, Homo sapiens
agccgggagatggaggccat

SEQ ID NO: 6475 - DNA, 20 bp, Homo sapiens
gccgggagatggaggccatc

SEQ ID NO: 6476 - DNA, 20 bp, Homo sapiens
ccgggagatggaggccatcc

SEQ ID NO: 6477 - DNA, 20 bp, Homo sapiens
cgggagatggaggccatccg

SEQ ID NO: 6478 - DNA, 20 bp, Homo sapiens
gggagatggaggccatccgc

SEQ ID NO: 6479 - DNA, 20 bp, Homo sapiens
ggagatggaggccatccgca

SEQ ID NO: 6480 - DNA, 20 bp, Homo sapiens
gcgaggcagaggctcggaac

SEQ ID NO: 6481 - DNA, 20 bp, Homo sapiens
ttcggccaggctgaggccct

SEQ ID NO: 6482 - DNA, 20 bp, Homo sapiens
tcggccaggctgaggccctg

SEQ ID NO: 6483 - DNA, 20 bp, Homo sapiens
ggccaggctgaggccctgac

SEQ ID NO: 6484 - DNA, 20 bp, Homo sapiens
gccaggctgaggccctgacg

SEQ ID NO: 6485 - DNA, 20 bp, Homo sapiens
gcttactcgggaaatttgct

SEQ ID NO: 6486 - DNA, 20 bp, Homo sapiens
cttactcgggaaatttgctt

SEQ ID NO: 6487 - DNA, 20 bp, Homo sapiens
tactcgggaaatttgctttt

SEQ ID NO: 6488 - DNA, 20 bp, Homo sapiens
actcgggaaatttgcttttg

SEQ ID NO: 6489 - DNA, 20 bp, Homo sapiens
ctcgggaaatttgcttttgc

SEQ ID NO: 6490 - DNA, 20 bp, Homo sapiens
tcgggaaatttgcttttgcc

SEQ ID NO: 6491 - DNA, 20 bp, Homo sapiens
cgggaaatttgcttttgcca

SEQ ID NO: 6492 - DNA, 20 bp, Homo sapiens
ggaaatttgcttttgccaaa

SEQ ID NO: 6493 - DNA, 20 bp, Homo sapiens
gaaatttgcttttgccaaac

SEQ ID NO: 6494 - DNA, 20 bp, Homo sapiens
aatttgcttttgccaaaccc

SEQ ID NO: 6495 - DNA, 20 bp, Homo sapiens
atttgcttttgccaaacccg

SEQ ID NO: 6496 - DNA, 20 bp, Homo sapiens
tgcttttgccaaacccgctt

SEQ ID NO: 6497 - DNA, 20 bp, Homo sapiens
gcttcggcggtttggatatt

SEQ ID NO: 6498 - DNA, 20 bp, Homo sapiens
cttcggcggtttggatattt

SEQ ID NO: 6499 - DNA, 20 bp, Homo sapiens
tcggcggtttggatatttat

SEQ ID NO: 6500 - DNA, 20 bp, Homo sapiens
cggcggtttggatatttatt

SEQ ID NO: 6501 - DNA, 20 bp, Homo sapiens
gcggtttggatatttattga

SEQ ID NO: 6502 - DNA, 20 bp, Homo sapiens
cggtttggatatttattgac

SEQ ID NO: 6503 - DNA, 20 bp, Homo sapiens
ggtttggatatttattgacc

SEQ ID NO: 6504 - DNA, 20 bp, Homo sapiens
gtttggatatttattgacct

SEQ ID NO: 6505 - DNA, 20 bp, Homo sapiens
tttggatatttattgacctc

SEQ ID NO: 6506 - DNA, 20 bp, Homo sapiens
tggatatttattgacctcgt

SEQ ID NO: 6507 - DNA, 20 bp, Homo sapiens
ggatatttattgacctcgtc

SEQ ID NO: 6508 - DNA, 20 bp, Homo sapiens
atatttattgacctcgtcct

SEQ ID NO: 6509 - DNA, 20 bp, Homo sapiens
tatttattgacctcgtcctc

SEQ ID NO: 6510 - DNA, 20 bp, Homo sapiens
tttattgacctcgtcctccg

SEQ ID NO: 6511 - DNA, 20 bp, Homo sapiens
ttattgacctcgtcctccga

SEQ ID NO: 6512 - DNA, 20 bp, Homo sapiens
attgacctcgtcctccgact

SEQ ID NO: 6513 - DNA, 20 bp, Homo sapiens
ttgacctcgtcctccgactc

SEQ ID NO: 6514 - DNA, 20 bp, Homo sapiens
gacctcgtcctccgactcgc

SEQ ID NO: 6515 - DNA, 20 bp, Homo sapiens
acctcgtcctccgactcgct

SEQ ID NO: 6516 - DNA, 20 bp, Homo sapiens
cctcgtcctccgactcgctg

SEQ ID NO: 6517 - DNA, 20 bp, Homo sapiens
ctcgtcctccgactcgctga

SEQ ID NO: 6518 - DNA, 20 bp, Homo sapiens
tcgtcctccgactcgctgac

SEQ ID NO: 6519 - DNA, 20 bp, Homo sapiens
gtcctccgactcgctgacag

SEQ ID NO: 6520 - DNA, 20 bp, Homo sapiens
tcctccgactcgctgacagg

SEQ ID NO: 6521 - DNA, 20 bp, Homo sapiens
ctccgactcgctgacaggct

SEQ ID NO: 6522 - DNA, 20 bp, Homo sapiens
cgttttggatgcactgagac

SEQ ID NO: 6523 - DNA, 20 bp, Homo sapiens
gttttggatgcactgagacc

SEQ ID NO: 6524 - DNA, 20 bp, Homo sapiens
ttttggatgcactgagaccc

SEQ ID NO: 6525 - DNA, 20 bp, Homo sapiens
tcgcgaataaaaggccctcc

SEQ ID NO: 6526 - DNA, 20 bp, Homo sapiens
cgcgaataaaaggccctcca

SEQ ID NO: 6527 - DNA, 20 bp, Homo sapiens
gcgaataaaaggccctccat

SEQ ID NO: 6528 - DNA, 20 bp, Homo sapiens
cgaataaaaggccctccatc

SEQ ID NO: 6529 - DNA, 20 bp, Homo sapiens
gaataaaaggccctccatct

SEQ ID NO: 6530 - DNA, 20 bp, Homo sapiens
aataaaaggccctccatctg

SEQ ID NO: 6531 - DNA, 20 bp, Homo sapiens
ataaaaggccctccatctgc

SEQ ID NO: 6532 - DNA, 16 bp, Homo sapiens
tgcttccgtgaggaga

SEQ ID NO: 6533 - DNA, 16 bp, Homo sapiens
gcttccgtgaggagag

SEQ ID NO: 6534 - DNA, 16 bp, Homo sapiens
cttccgtgaggagagg

SEQ ID NO: 6535 - DNA, 16 bp, Homo sapiens
actgctgagcaagttt

SEQ ID NO: 6536 - DNA, 16 bp, Homo sapiens
ctgctgagcaagtttg

SEQ ID NO: 6537 - DNA, 16 bp, Homo sapiens
tgctgagcaagtttgg

SEQ ID NO: 6538 - DNA, 16 bp, Homo sapiens
gctgagcaagtttggg

SEQ ID NO: 6539 - DNA, 16 bp, Homo sapiens
tgagcaagtttgggga

SEQ ID NO: 6540 - DNA, 16 bp, Homo sapiens
cacagggacatcaaac

SEQ ID NO: 6541 - DNA, 16 bp, Homo sapiens
acagggacatcaaacc

SEQ ID NO: 6542 - DNA, 16 bp, Homo sapiens
cagggacatcaaaccc

SEQ ID NO: 6543 - DNA, 16 bp, Homo sapiens
agatcctgcaggctgt

SEQ ID NO: 6544 - DNA, 16 bp, Homo sapiens
gatcctgcaggctgtg

SEQ ID NO: 6545 - DNA, 16 bp, Homo sapiens
atcctgcaggctgtgg

SEQ ID NO: 6546 - DNA, 16 bp, Homo sapiens
tcctgcaggctgtggg

SEQ ID NO: 6547 - DNA, 16 bp, Homo sapiens
caggctgtgggcggtg

SEQ ID NO: 6548 - DNA, 16 bp, Homo sapiens
aggctgtgggcggtgg

SEQ ID NO: 6549 - DNA, 16 bp, Homo sapiens
ggctgtgggcggtggg

SEQ ID NO: 6550 - DNA, 16 bp, Homo sapiens
gctgtgggcggtgggc

SEQ ID NO: 6551 - DNA, 16 bp, Homo sapiens
tgggcggtgggcctgg

SEQ ID NO: 6552 - DNA, 16 bp, Homo sapiens
ggcggtgggcctggga

SEQ ID NO: 6553 - DNA, 16 bp, Homo sapiens
tttcgaaggtgccacc

SEQ ID NO: 6554 - DNA, 16 bp, Homo sapiens
ttcgaaggtgccaccg

SEQ ID NO: 6555 - DNA, 16 bp, Homo sapiens
tcgaaggtgccaccga

SEQ ID NO: 6556 - DNA, 16 bp, Homo sapiens
ggaggacgggctcact

SEQ ID NO: 6557 - DNA, 16 bp, Homo sapiens
gaggacgggctcactg

SEQ ID NO: 6558 - DNA, 16 bp, Homo sapiens
aggacgggctcactgc

SEQ ID NO: 6559 - DNA, 16 bp, Homo sapiens
gtcggacattcgggaa

SEQ ID NO: 6560 - DNA, 16 bp, Homo sapiens
tcggacattcgggaag

SEQ ID NO: 6561 - DNA, 16 bp, Homo sapiens
cggacattcgggaagg

SEQ ID NO: 6562 - DNA, 16 bp, Homo sapiens
ggacattcgggaaggt

SEQ ID NO: 6563 - DNA, 16 bp, Homo sapiens
gacattcgggaaggtg

SEQ ID NO: 6564 - DNA, 16 bp, Homo sapiens
acattcgggaaggtgc

SEQ ID NO: 6565 - DNA, 16 bp, Homo sapiens
cattcgggaaggtgcg

SEQ ID NO: 6566 - DNA, 16 bp, Homo sapiens
agttgcaggagcggat

SEQ ID NO: 6567 - DNA, 16 bp, Homo sapiens
gttgcaggagcggatg

SEQ ID NO: 6568 - DNA, 16 bp, Homo sapiens
ttgcaggagcggatgg

SEQ ID NO: 6569 - DNA, 16 bp, Homo sapiens
ggccacggatccacct

SEQ ID NO: 6570 - DNA, 16 bp, Homo sapiens
acggatccaccttccc

SEQ ID NO: 6571 - DNA, 16 bp, Homo sapiens
ctttccctgctcctgt

SEQ ID NO: 6572 - DNA, 16 bp, Homo sapiens
aactcaccgcagtctg

SEQ ID NO: 6573 - DNA, 16 bp, Homo sapiens
gcgccgcccaggagcc

SEQ ID NO: 6574 - DNA, 16 bp, Homo sapiens
ccgcccaggagccgcc

SEQ ID NO: 6575 - DNA, 16 bp, Homo sapiens
ccaggagccgcccgcg

SEQ ID NO: 6576 - DNA, 16 bp, Homo sapiens
ggagccgcccgcgctc

SEQ ID NO: 6577 - DNA, 16 bp, Homo sapiens
ccgcgctccctgaacc

SEQ ID NO: 6578 - DNA, 16 bp, Homo sapiens
cctgaaccctagaact

SEQ ID NO: 6579 - DNA, 16 bp, Homo sapiens
gaaccctagaactgtc

SEQ ID NO: 6580 - DNA, 16 bp, Homo sapiens
aaccctagaactgtct

SEQ ID NO: 6581 - DNA, 16 bp, Homo sapiens
accctagaactgtctt

SEQ ID NO: 6582 - DNA, 16 bp, Homo sapiens
ccctagaactgtcttc

SEQ ID NO: 6583 - DNA, 16 bp, Homo sapiens
cctagaactgtcttcg

SEQ ID NO: 6584 - DNA, 16 bp, Homo sapiens
ctagaactgtcttcga

SEQ ID NO: 6585 - DNA, 16 bp, Homo sapiens
tagaactgtcttcgac

SEQ ID NO: 6586 - DNA, 16 bp, Homo sapiens
agaactgtcttcgact

SEQ ID NO: 6587 - DNA, 16 bp, Homo sapiens
gaactgtcttcgactc

SEQ ID NO: 6588 - DNA, 16 bp, Homo sapiens
aactgtcttcgactcc

SEQ ID NO: 6589 - DNA, 16 bp, Homo sapiens
actgtcttcgactccg

SEQ ID NO: 6590 - DNA, 16 bp, Homo sapiens
ctgtcttcgactccgg

SEQ ID NO: 6591 - DNA, 16 bp, Homo sapiens
tgtcttcgactccggg

SEQ ID NO: 6592 - DNA, 16 bp, Homo sapiens
gtcttcgactccgggg

SEQ ID NO: 6593 - DNA, 16 bp, Homo sapiens
tcttcgactccggggc

SEQ ID NO: 6594 - DNA, 16 bp, Homo sapiens
cttcgactccggggcc

SEQ ID NO: 6595 - DNA, 16 bp, Homo sapiens
ttcgactccggggccc

SEQ ID NO: 6596 - DNA, 16 bp, Homo sapiens
tgccagttcacaaccg

SEQ ID NO: 6597 - DNA, 16 bp, Homo sapiens
ccagttcacaaccgct

SEQ ID NO: 6598 - DNA, 16 bp, Homo sapiens
tggttcgcaaagtgca

SEQ ID NO: 6599 - DNA, 16 bp, Homo sapiens
cgttggttcgcaaagt

SEQ ID NO: 6600 - DNA, 16 bp, Homo sapiens
caaagtgcaaagcttt

SEQ ID NO: 6601 - DNA, 16 bp, Homo sapiens
gcctgcttactcggga

SEQ ID NO: 6602 - DNA, 16 bp, Homo sapiens
tcctcacttgcgctgc

SEQ ID NO: 6603 - DNA, 16 bp, Homo sapiens
cctccgactcgctgac

SEQ ID NO: 6604 - DNA, 16 bp, Homo sapiens
ccgactcgctgacagg

SEQ ID NO: 6605 - DNA, 16 bp, Homo sapiens
cgactcgctgacaggc

SEQ ID NO: 6606 - DNA, 16 bp, Homo sapiens
ggatgcactgagaccc

SEQ ID NO: 6607 - DNA, 16 bp, Homo sapiens
gcctctggaaaaacct

SEQ ID NO: 6608 - DNA, 16 bp, Homo sapiens
cctctggaaaaacctt

SEQ ID NO: 6609 - DNA, 16 bp, Homo sapiens
ggacccagcagtgacc

SEQ ID NO: 6610 - DNA, 16 bp, Homo sapiens
agcagacagaaaccac

SEQ ID NO: 6611 - DNA, 16 bp, Homo sapiens
caccgcctgccagttc

SEQ ID NO: 6612 - DNA, 16 bp, Homo sapiens
cgcctgccagttcaca

SEQ ID NO: 6613 - DNA, 16 bp, Homo sapiens
tccgcccagctccagt

SEQ ID NO: 6614 - DNA, 16 bp, Homo sapiens
gcccagctccagtcct

SEQ ID NO: 6615 - DNA, 16 bp, Homo sapiens
agctccagtcctgtga

SEQ ID NO: 6616 - DNA, 16 bp, Homo sapiens
gctccagtcctgtgat

SEQ ID NO: 6617 - DNA, 16 bp, Homo sapiens
tccagtcctgtgatcc

SEQ ID NO: 6618 - DNA, 16 bp, Homo sapiens
tttcggccaggctgag

SEQ ID NO: 6619 - DNA, 16 bp, Homo sapiens
aggctgaggccctgac

SEQ ID NO: 6620 - DNA, 16 bp, Homo sapiens
ggctgaggccctgacg

SEQ ID NO: 6621 - DNA, 16 bp, Homo sapiens
gttcgcaaagtgcaaa

SEQ ID NO: 6622 - DNA, 16 bp, Homo sapiens
gcttactcgggaaatt

SEQ ID NO: 6623 - DNA, 16 bp, Homo sapiens
tactcgggaaatttgc

SEQ ID NO: 6624 - DNA, 16 bp, Homo sapiens
actcgggaaatttgct

SEQ ID NO: 6625 - DNA, 16 bp, Homo sapiens
ctcgggaaatttgctt

SEQ ID NO: 6626 - DNA, 16 bp, Homo sapiens
tcgggaaatttgcttt

SEQ ID NO: 6627 - DNA, 16 bp, Homo sapiens
cgggaaatttgctttt

SEQ ID NO: 6628 - DNA, 16 bp, Homo sapiens
gaaatttgcttttgcc

SEQ ID NO: 6629 - DNA, 16 bp, Homo sapiens
tttgcttttgccaaac

SEQ ID NO: 6630 - DNA, 16 bp, Homo sapiens
ttgcttttgccaaacc

SEQ ID NO: 6631 - DNA, 16 bp, Homo sapiens
tgcttttgccaaaccc

SEQ ID NO: 6632 - DNA, 16 bp, Homo sapiens
cttttgccaaacccgc

SEQ ID NO: 6633 - DNA, 16 bp, Homo sapiens
ttttgccaaacccgct

SEQ ID NO: 6634 - DNA, 16 bp, Homo sapiens
tttgccaaacccgctt

SEQ ID NO: 6635 - DNA, 16 bp, Homo sapiens
cgctgctctcggagcc

SEQ ID NO: 6636 - DNA, 16 bp, Homo sapiens
gcggtttggatattta

SEQ ID NO: 6637 - DNA, 16 bp, Homo sapiens
ttggatatttattgac

SEQ ID NO: 6638 - DNA, 16 bp, Homo sapiens
ggatatttattgacct

SEQ ID NO: 6639 - DNA, 16 bp, Homo sapiens
atatttattgacctcg

SEQ ID NO: 6640 - DNA, 16 bp, Homo sapiens
tatttattgacctcgt

SEQ ID NO: 6641 - DNA, 16 bp, Homo sapiens
atttattgacctcgtc

SEQ ID NO: 6642 - DNA, 16 bp, Homo sapiens
tttattgacctcgtcc

SEQ ID NO: 6643 - DNA, 16 bp, Homo sapiens
ttattgacctcgtcct

SEQ ID NO: 6644 - DNA, 16 bp, Homo sapiens
tattgacctcgtcctc

SEQ ID NO: 6645 - DNA, 16 bp, Homo sapiens
tgacctcgtcctccga

SEQ ID NO: 6646 - DNA, 16 bp, Homo sapiens
gacctcgtcctccgac

SEQ ID NO: 6647 - DNA, 16 bp, Homo sapiens
acctcgtcctccgact

SEQ ID NO: 6648 - DNA, 16 bp, Homo sapiens
cctcgtcctccgactc

SEQ ID NO: 6649 - DNA, 16 bp, Homo sapiens
ctcgtcctccgactcg

SEQ ID NO: 6650 - DNA, 16 bp, Homo sapiens
cgtcctccgactcgct

SEQ ID NO: 6651 - DNA, 16 bp, Homo sapiens
gtcctccgactcgctg

SEQ ID NO: 6652 - DNA, 16 bp, Homo sapiens
tcctccgactcgctga

SEQ ID NO: 6653 - DNA, 16 bp, Homo sapiens
ctccgactcgctgaca

SEQ ID NO: 6654 - DNA, 16 bp, Homo sapiens
tccgactcgctgacag

SEQ ID NO: 6655 - DNA, 16 bp, Homo sapiens
cgttttggatgcactg

SEQ ID NO: 6656 - DNA, 16 bp, Homo sapiens
tttggatgcactgaga

SEQ ID NO: 6657 - DNA, 16 bp, Homo sapiens
ttggatgcactgagac

SEQ ID NO: 6658 - DNA, 16 bp, Homo sapiens
tcctcggtatttattg

SEQ ID NO: 6659 - DNA, 16 bp, Homo sapiens
tcggtatttattgtct

SEQ ID NO: 6660 - DNA, 16 bp, Homo sapiens
cggtatttattgtctg

SEQ ID NO: 6661 - DNA, 16 bp, Homo sapiens
gtgtcgtgcttccgtg

SEQ ID NO: 6662 - DNA, 16 bp, Homo sapiens
tgtcgtgcttccgtga

SEQ ID NO: 6663 - DNA, 16 bp, Homo sapiens
gtcgtgcttccgtgag

SEQ ID NO: 6664 - DNA, 16 bp, Homo sapiens
ccgtgaggagagggac

SEQ ID NO: 6665 - DNA, 16 bp, Homo sapiens
cgtgaggagagggacg

SEQ ID NO: 6666 - DNA, 16 bp, Homo sapiens
cgtgttggtgaatggg

SEQ ID NO: 6667 - DNA, 16 bp, Homo sapiens
gtgttggtgaatgggg

SEQ ID NO: 6668 - DNA, 16 bp, Homo sapiens
tgttggtgaatgggga

SEQ ID NO: 6669 - DNA, 16 bp, Homo sapiens
gttggtgaatggggac

SEQ ID NO: 6670 - DNA, 16 bp, Homo sapiens
ttggtgaatggggacc

SEQ ID NO: 6671 - DNA, 16 bp, Homo sapiens
tggtgaatggggaccg

SEQ ID NO: 6672 - DNA, 16 bp, Homo sapiens
ggtgaatggggaccgg

SEQ ID NO: 6673 - DNA, 16 bp, Homo sapiens
gtgaatggggaccggc

SEQ ID NO: 6674 - DNA, 16 bp, Homo sapiens
tgaatggggaccggcg

SEQ ID NO: 6675 - DNA, 16 bp, Homo sapiens
gaatggggaccggcgg

SEQ ID NO: 6676 - DNA, 16 bp, Homo sapiens
aatggggaccggcggt

SEQ ID NO: 6677 - DNA, 16 bp, Homo sapiens
atggggaccggcggtg

SEQ ID NO: 6678 - DNA, 16 bp, Homo sapiens
tggggaccggcggtgg

SEQ ID NO: 6679 - DNA, 16 bp, Homo sapiens
ggggaccggcggtgga

SEQ ID NO: 6680 - DNA, 16 bp, Homo sapiens
gggaccggcggtggat

SEQ ID NO: 6681 - DNA, 16 bp, Homo sapiens
ggaccggcggtggatc

SEQ ID NO: 6682 - DNA, 16 bp, Homo sapiens
gaccggcggtggatca

SEQ ID NO: 6683 - DNA, 16 bp, Homo sapiens
accggcggtggatcac

SEQ ID NO: 6684 - DNA, 16 bp, Homo sapiens
ccggcggtggatcacg

SEQ ID NO: 6685 - DNA, 16 bp, Homo sapiens
ttcgccttccaggatg

SEQ ID NO: 6686 - DNA, 16 bp, Homo sapiens
tcgccttccaggatga

SEQ ID NO: 6687 - DNA, 16 bp, Homo sapiens
ttccaggatgagaact

SEQ ID NO: 6688 - DNA, 16 bp, Homo sapiens
tccaggatgagaacta

SEQ ID NO: 6689 - DNA, 16 bp, Homo sapiens
ccaggatgagaactac

SEQ ID NO: 6690 - DNA, 16 bp, Homo sapiens
gaactacctgtacctg

SEQ ID NO: 6691 - DNA, 16 bp, Homo sapiens
aactacctgtacctgg

SEQ ID NO: 6692 - DNA, 16 bp, Homo sapiens
ctacctgtacctggtc

SEQ ID NO: 6693 - DNA, 16 bp, Homo sapiens
gtacctggtcatggag

SEQ ID NO: 6694 - DNA, 16 bp, Homo sapiens
tacctggtcatggagt

SEQ ID NO: 6695 - DNA, 16 bp, Homo sapiens
acctggtcatggagta

SEQ ID NO: 6696 - DNA, 16 bp, Homo sapiens
ctggtcatggagtatt

SEQ ID NO: 6697 - DNA, 16 bp, Homo sapiens
tggtcatggagtatta

SEQ ID NO: 6698 - DNA, 16 bp, Homo sapiens
ggtcatggagtattac

SEQ ID NO: 6699 - DNA, 16 bp, Homo sapiens
gtcatggagtattacg

SEQ ID NO: 6700 - DNA, 16 bp, Homo sapiens
gacactgctgagcaag

SEQ ID NO: 6701 - DNA, 16 bp, Homo sapiens
acactgctgagcaagt

SEQ ID NO: 6702 - DNA, 16 bp, Homo sapiens
cactgctgagcaagtt

SEQ ID NO: 6703 - DNA, 16 bp, Homo sapiens
gcaagtttggggagcg

SEQ ID NO: 6704 - DNA, 16 bp, Homo sapiens
caagtttggggagcgg

SEQ ID NO: 6705 - DNA, 16 bp, Homo sapiens
aagtttggggagcgga

SEQ ID NO: 6706 - DNA, 16 bp, Homo sapiens
agtttggggagcggat

SEQ ID NO: 6707 - DNA, 16 bp, Homo sapiens
gtttggggagcggatt

SEQ ID NO: 6708 - DNA, 16 bp, Homo sapiens
tttggggagcggattc

SEQ ID NO: 6709 - DNA, 16 bp, Homo sapiens
ttggggagcggattcc

SEQ ID NO: 6710 - DNA, 16 bp, Homo sapiens
tggggagcggattccg

SEQ ID NO: 6711 - DNA, 16 bp, Homo sapiens
ggggagcggattccgg

SEQ ID NO: 6712 - DNA, 16 bp, Homo sapiens
gggagcggattccggc

SEQ ID NO: 6713 - DNA, 16 bp, Homo sapiens
gagatggcgcgcttct

SEQ ID NO: 6714 - DNA, 16 bp, Homo sapiens
agatggcgcgcttcta

SEQ ID NO: 6715 - DNA, 16 bp, Homo sapiens
gatggcgcgcttctac

SEQ ID NO: 6716 - DNA, 16 bp, Homo sapiens
atggcgcgcttctacc

SEQ ID NO: 6717 - DNA, 16 bp, Homo sapiens
tggcgcgcttctacct

SEQ ID NO: 6718 - DNA, 16 bp, Homo sapiens
ggcgcgcttctacctg

SEQ ID NO: 6719 - DNA, 16 bp, Homo sapiens
gcgcgcttctacctgg

SEQ ID NO: 6720 - DNA, 16 bp, Homo sapiens
cgcgcttctacctggc

SEQ ID NO: 6721 - DNA, 16 bp, Homo sapiens
gcgcttctacctggcg

SEQ ID NO: 6722 - DNA, 16 bp, Homo sapiens
cgcttctacctggcgg

SEQ ID NO: 6723 - DNA, 16 bp, Homo sapiens
gcttctacctggcgga

SEQ ID NO: 6724 - DNA, 16 bp, Homo sapiens
ctggcggagattgtca

SEQ ID NO: 6725 - DNA, 16 bp, Homo sapiens
tggcggagattgtcat

SEQ ID NO: 6726 - DNA, 16 bp, Homo sapiens
ggcggagattgtcatg

SEQ ID NO: 6727 - DNA, 16 bp, Homo sapiens
gcggagattgtcatgg

SEQ ID NO: 6728 - DNA, 16 bp, Homo sapiens
cggagattgtcatggc

SEQ ID NO: 6729 - DNA, 16 bp, Homo sapiens
ggagattgtcatggcc

SEQ ID NO: 6730 - DNA, 16 bp, Homo sapiens
ctaagagaacagttgg

SEQ ID NO: 6731 - DNA, 16 bp, Homo sapiens
aagagaacagttggtt

SEQ ID NO: 6732 - DNA, 16 bp, Homo sapiens
cagcttttattactgg

SEQ ID NO: 6733 - DNA, 16 bp, Homo sapiens
gcttttattactggac

SEQ ID NO: 6734 - DNA, 16 bp, Homo sapiens
tttattactggacaac

SEQ ID NO: 6735 - DNA, 16 bp, Homo sapiens
tattactggacaacat

SEQ ID NO: 6736 - DNA, 16 bp, Homo sapiens
ttactggacaacatta

SEQ ID NO: 6737 - DNA, 16 bp, Homo sapiens
gtgggtcaggattgaa

SEQ ID NO: 6738 - DNA, 16 bp, Homo sapiens
gggtcaggattgaacc

SEQ ID NO: 6739 - DNA, 16 bp, Homo sapiens
gtcaggattgaaccca

SEQ ID NO: 6740 - DNA, 16 bp, Homo sapiens
caggattgaacccatc

SEQ ID NO: 6741 - DNA, 16 bp, Homo sapiens
ggattgaacccatcct

SEQ ID NO: 6742 - DNA, 16 bp, Homo sapiens
attgaacccatcctct

SEQ ID NO: 6743 - DNA, 16 bp, Homo sapiens
cccacaggagggactg

SEQ ID NO: 6744 - DNA, 16 bp, Homo sapiens
cacaggagggactgct

SEQ ID NO: 6745 - DNA, 16 bp, Homo sapiens
cccacagctgagtggg

SEQ ID NO: 6746 - DNA, 16 bp, Homo sapiens
cacagctgagtggggt

SEQ ID NO: 6747 - DNA, 16 bp, Homo sapiens
cagctgagtggggtgt

SEQ ID NO: 6748 - DNA, 16 bp, Homo sapiens
gctgagtggggtgtgc

SEQ ID NO: 6749 - DNA, 16 bp, Homo sapiens
gagtggggtgtgctga

SEQ ID NO: 6750 - DNA, 16 bp, Homo sapiens
ccagtcttaggaccac

SEQ ID NO: 6751 - DNA, 16 bp, Homo sapiens
gtcttaggaccacatc

SEQ ID NO: 6752 - DNA, 16 bp, Homo sapiens
cttaggaccacatctg

SEQ ID NO: 6753 - DNA, 16 bp, Homo sapiens
accacatctgtggagg

SEQ ID NO: 6754 - DNA, 16 bp, Homo sapiens
atctgtggaggtggcc

SEQ ID NO: 6755 - DNA, 16 bp, Homo sapiens
tggccagagccaagca

SEQ ID NO: 6756 - DNA, 16 bp, Homo sapiens
gccagagccaagcagt

SEQ ID NO: 6757 - DNA, 16 bp, Homo sapiens
cagagccaagcagtct

SEQ ID NO: 6758 - DNA, 16 bp, Homo sapiens
gagccaagcagtctcc

SEQ ID NO: 6759 - DNA, 16 bp, Homo sapiens
agaagaggggtctgca

SEQ ID NO: 6760 - DNA, 16 bp, Homo sapiens
catgtcaagggaggag

SEQ ID NO: 6761 - DNA, 16 bp, Homo sapiens
gaacatgggggtctgg

SEQ ID NO: 6762 - DNA, 16 bp, Homo sapiens
acatgggggtctggac

SEQ ID NO: 6763 - DNA, 16 bp, Homo sapiens
atgggggtctggaccc

SEQ ID NO: 6764 - DNA, 16 bp, Homo sapiens
agtccctgcagaaggt

SEQ ID NO: 6765 - DNA, 16 bp, Homo sapiens
ccctgcagaaggttta

SEQ ID NO: 6766 - DNA, 16 bp, Homo sapiens
aggggcagggcttttc

SEQ ID NO: 6767 - DNA, 16 bp, Homo sapiens
ggcagggcttttccta

SEQ ID NO: 6768 - DNA, 16 bp, Homo sapiens
cagggcttttcctaag

SEQ ID NO: 6769 - DNA, 16 bp, Homo sapiens
gggcttttcctaagca

SEQ ID NO: 6770 - DNA, 16 bp, Homo sapiens
gcttttcctaagcaga

SEQ ID NO: 6771 - DNA, 16 bp, Homo sapiens
ttcctaagcagaggag

SEQ ID NO: 6772 - DNA, 16 bp, Homo sapiens
cctaagcagaggaggg

SEQ ID NO: 6773 - DNA, 16 bp, Homo sapiens
cccttcctcaaatcag

SEQ ID NO: 6774 - DNA, 16 bp, Homo sapiens
cttcctcaaatcagga

SEQ ID NO: 6775 - DNA, 16 bp, Homo sapiens
tcctcaaatcaggagg

SEQ ID NO: 6776 - DNA, 16 bp, Homo sapiens
ctcaaatcaggaggtc

SEQ ID NO: 6777 - DNA, 16 bp, Homo sapiens
caaatcaggaggtctt

SEQ ID NO: 6778 - DNA, 16 bp, Homo sapiens
aatcaggaggtcttgg

SEQ ID NO: 6779 - DNA, 16 bp, Homo sapiens
gaggtcttggaagcag

SEQ ID NO: 6780 - DNA, 16 bp, Homo sapiens
ggtcttggaagcagct

SEQ ID NO: 6781 - DNA, 16 bp, Homo sapiens
tcttggaagcagctgc

SEQ ID NO: 6782 - DNA, 16 bp, Homo sapiens
tctggttctccaccag

SEQ ID NO: 6783 - DNA, 16 bp, Homo sapiens
tggttctccaccagag

SEQ ID NO: 6784 - DNA, 16 bp, Homo sapiens
gttctccaccagagaa

SEQ ID NO: 6785 - DNA, 16 bp, Homo sapiens
tctccaccagagaatc

SEQ ID NO: 6786 - DNA, 16 bp, Homo sapiens
ggatgaaacagtaagt

SEQ ID NO: 6787 - DNA, 16 bp, Homo sapiens
ggggagggggtccgtc

SEQ ID NO: 6788 - DNA, 16 bp, Homo sapiens
ggagggggtccgtcag

SEQ ID NO: 6789 - DNA, 16 bp, Homo sapiens
agggggtccgtcaggg

SEQ ID NO: 6790 - DNA, 16 bp, Homo sapiens
gaaaaggtgagggctt

SEQ ID NO: 6791 - DNA, 16 bp, Homo sapiens
aaaggtgagggcttcc

SEQ ID NO: 6792 - DNA, 16 bp, Homo sapiens
aggtgagggcttcccg

SEQ ID NO: 6793 - DNA, 16 bp, Homo sapiens
gtgagggcttcccggg

SEQ ID NO: 6794 - DNA, 16 bp, Homo sapiens
gagggcttcccgggtg

SEQ ID NO: 6795 - DNA, 16 bp, Homo sapiens
gggcttcccgggtggc

SEQ ID NO: 6796 - DNA, 16 bp, Homo sapiens
gcttcccgggtggcgt

SEQ ID NO: 6797 - DNA, 16 bp, Homo sapiens
gacttcctgaacagaa

SEQ ID NO: 6798 - DNA, 16 bp, Homo sapiens
cttcctgaacagaagc

SEQ ID NO: 6799 - DNA, 16 bp, Homo sapiens
aggggtgggcccaagc

SEQ ID NO: 6800 - DNA, 16 bp, Homo sapiens
gggtgggcccaagcct

SEQ ID NO: 6801 - DNA, 16 bp, Homo sapiens
gtgggcccaagcctcg

SEQ ID NO: 6802 - DNA, 16 bp, Homo sapiens
gggcccaagcctcgct

SEQ ID NO: 6803 - DNA, 16 bp, Homo sapiens
gcccaagcctcgctct

SEQ ID NO: 6804 - DNA, 16 bp, Homo sapiens
ccaagcctcgctctgc

SEQ ID NO: 6805 - DNA, 16 bp, Homo sapiens
aagcctcgctctgctc

SEQ ID NO: 6806 - DNA, 16 bp, Homo sapiens
ctcgctctgctccttt

SEQ ID NO: 6807 - DNA, 16 bp, Homo sapiens
cgctctgctccttttg

SEQ ID NO: 6808 - DNA, 16 bp, Homo sapiens
tgctccttttggtcca

SEQ ID NO: 6809 - DNA, 16 bp, Homo sapiens
ctccttttggtccagg

SEQ ID NO: 6810 - DNA, 16 bp, Homo sapiens
ccttttggtccaggtg

SEQ ID NO: 6811 - DNA, 16 bp, Homo sapiens
ttttggtccaggtgcg

SEQ ID NO: 6812 - DNA, 16 bp, Homo sapiens
tggtccaggtgcggtc

SEQ ID NO: 6813 - DNA, 16 bp, Homo sapiens
tcgtccactacaaggt

SEQ ID NO: 6814 - DNA, 16 bp, Homo sapiens
gtccactacaaggtga

SEQ ID NO: 6815 - DNA, 16 bp, Homo sapiens
ccactacaaggtgagc

SEQ ID NO: 6816 - DNA, 16 bp, Homo sapiens
ctatcgcctcctctcc

SEQ ID NO: 6817 - DNA, 16 bp, Homo sapiens
atcgcctcctctccct

SEQ ID NO: 6818 - DNA, 16 bp, Homo sapiens
ctctgagcaggagcac

SEQ ID NO: 6819 - DNA, 16 bp, Homo sapiens
ctgagcaggagcacct

SEQ ID NO: 6820 - DNA, 16 bp, Homo sapiens
gagcaggagcacctct

SEQ ID NO: 6821 - DNA, 16 bp, Homo sapiens
gcaggagcacctctct

SEQ ID NO: 6822 - DNA, 16 bp, Homo sapiens
tgagcgggggcggggt

SEQ ID NO: 6823 - DNA, 16 bp, Homo sapiens
agcgggggcggggtag

SEQ ID NO: 6824 - DNA, 16 bp, Homo sapiens
cgggggcggggtaggt

SEQ ID NO: 6825 - DNA, 16 bp, Homo sapiens
ggggcggggtaggtac

SEQ ID NO: 6826 - DNA, 16 bp, Homo sapiens
ggcggggtaggtacct

SEQ ID NO: 6827 - DNA, 16 bp, Homo sapiens
gctgcgggaacctccc

SEQ ID NO: 6828 - DNA, 16 bp, Homo sapiens
aagttggagtaaggac

SEQ ID NO: 6829 - DNA, 16 bp, Homo sapiens
gttggagtaaggacag

SEQ ID NO: 6830 - DNA, 16 bp, Homo sapiens
tggagtaaggacagtg

SEQ ID NO: 6831 - DNA, 16 bp, Homo sapiens
gagtaaggacagtgcc

SEQ ID NO: 6832 - DNA, 16 bp, Homo sapiens
gtaaggacagtgccta

SEQ ID NO: 6833 - DNA, 16 bp, Homo sapiens
aaggacagtgcctacc

SEQ ID NO: 6834 - DNA, 16 bp, Homo sapiens
gacccagcagtgacct

SEQ ID NO: 6835 - DNA, 16 bp, Homo sapiens
cccagcagtgacctag

SEQ ID NO: 6836 - DNA, 16 bp, Homo sapiens
cagcagtgacctagac

SEQ ID NO: 6837 - DNA, 16 bp, Homo sapiens
gcagtgacctagactt

SEQ ID NO: 6838 - DNA, 16 bp, Homo sapiens
tgagacaatggagtgc

SEQ ID NO: 6839 - DNA, 16 bp, Homo sapiens
agacaatggagtgcag

SEQ ID NO: 6840 - DNA, 16 bp, Homo sapiens
acaatggagtgcaggg

SEQ ID NO: 6841 - DNA, 16 bp, Homo sapiens
aatggagtgcaggggg

SEQ ID NO: 6842 - DNA, 16 bp, Homo sapiens
ctcctgactcagcaag

SEQ ID NO: 6843 - DNA, 16 bp, Homo sapiens
cctgactcagcaagga

SEQ ID NO: 6844 - DNA, 16 bp, Homo sapiens
tgactcagcaaggaag

SEQ ID NO: 6845 - DNA, 16 bp, Homo sapiens
actcagcaaggaaggt

SEQ ID NO: 6846 - DNA, 16 bp, Homo sapiens
tcagcaaggaaggtcc

SEQ ID NO: 6847 - DNA, 16 bp, Homo sapiens
agcaaggaaggtcctg

SEQ ID NO: 6848 - DNA, 16 bp, Homo sapiens
aaggtcctggagggct

SEQ ID NO: 6849 - DNA, 16 bp, Homo sapiens
ctggagtggggagcta

SEQ ID NO: 6850 - DNA, 16 bp, Homo sapiens
ggagtggggagctatc

SEQ ID NO: 6851 - DNA, 16 bp, Homo sapiens
agtggggagctatctg

SEQ ID NO: 6852 - DNA, 16 bp, Homo sapiens
tggggagctatctgag

SEQ ID NO: 6853 - DNA, 16 bp, Homo sapiens
gggagctatctgagct

SEQ ID NO: 6854 - DNA, 16 bp, Homo sapiens
gagctatctgagctga

SEQ ID NO: 6855 - DNA, 16 bp, Homo sapiens
gctatctgagctgaga

SEQ ID NO: 6856 - DNA, 16 bp, Homo sapiens
aagcaggagaggactc

SEQ ID NO: 6857 - DNA, 16 bp, Homo sapiens
aggagaggactcctcc

SEQ ID NO: 6858 - DNA, 16 bp, Homo sapiens
gagaggactcctcctc

SEQ ID NO: 6859 - DNA, 16 bp, Homo sapiens
tctgggtgcccttttg

SEQ ID NO: 6860 - DNA, 16 bp, Homo sapiens
tgggtgcccttttgct

SEQ ID NO: 6861 - DNA, 16 bp, Homo sapiens
acaatactggggatcc

SEQ ID NO: 6862 - DNA, 16 bp, Homo sapiens
aatactggggatccag

SEQ ID NO: 6863 - DNA, 16 bp, Homo sapiens
tactggggatccagca

SEQ ID NO: 6864 - DNA, 16 bp, Homo sapiens
ttgcagtctagagaat

SEQ ID NO: 6865 - DNA, 16 bp, Homo sapiens
gcagtctagagaatta

SEQ ID NO: 6866 - DNA, 16 bp, Homo sapiens
agtctagagaattaga

SEQ ID NO: 6867 - DNA, 16 bp, Homo sapiens
tctagagaattagaga

SEQ ID NO: 6868 - DNA, 16 bp, Homo sapiens
ttagagaattatggag

SEQ ID NO: 6869 - DNA, 16 bp, Homo sapiens
gagaattatggagagt

SEQ ID NO: 6870 - DNA, 16 bp, Homo sapiens
gaattatggagagtgt

SEQ ID NO: 6871 - DNA, 16 bp, Homo sapiens
attatggagagtgtgg

SEQ ID NO: 6872 - DNA, 16 bp, Homo sapiens
tatggagagtgtggca

SEQ ID NO: 6873 - DNA, 16 bp, Homo sapiens
gcaggatgggcatggg

SEQ ID NO: 6874 - DNA, 16 bp, Homo sapiens
caacatttctctgtcc

SEQ ID NO: 6875 - DNA, 16 bp, Homo sapiens
ctctgtcctatgccac

SEQ ID NO: 6876 - DNA, 16 bp, Homo sapiens
ctgtcctatgccacca

SEQ ID NO: 6877 - DNA, 16 bp, Homo sapiens
aggggcagagtaaggt

SEQ ID NO: 6878 - DNA, 16 bp, Homo sapiens
gggcagagtaaggtca

SEQ ID NO: 6879 - DNA, 16 bp, Homo sapiens
gcagagtaaggtcagc

SEQ ID NO: 6880 - DNA, 16 bp, Homo sapiens
agagtaaggtcagcag

SEQ ID NO: 6881 - DNA, 16 bp, Homo sapiens
agtaaggtcagcagag

SEQ ID NO: 6882 - DNA, 16 bp, Homo sapiens
taaggtcagcagaggc

SEQ ID NO: 6883 - DNA, 16 bp, Homo sapiens
tgactcagagccatgg

SEQ ID NO: 6884 - DNA, 16 bp, Homo sapiens
actcagagccatggct

SEQ ID NO: 6885 - DNA, 16 bp, Homo sapiens
gagtcacagcaggcta

SEQ ID NO: 6886 - DNA, 16 bp, Homo sapiens
gccaacagcctcccat

SEQ ID NO: 6887 - DNA, 16 bp, Homo sapiens
caacagcctcccatgg

SEQ ID NO: 6888 - DNA, 16 bp, Homo sapiens
acagcctcccatggcc

SEQ ID NO: 6889 - DNA, 16 bp, Homo sapiens
catggcctctctgcac

SEQ ID NO: 6890 - DNA, 16 bp, Homo sapiens
gtcatgctgggagctc

SEQ ID NO: 6891 - DNA, 16 bp, Homo sapiens
atgctgggagctccct

SEQ ID NO: 6892 - DNA, 16 bp, Homo sapiens
aagtgggctctatggc

SEQ ID NO: 6893 - DNA, 16 bp, Homo sapiens
gtgggctctatggccc

SEQ ID NO: 6894 - DNA, 16 bp, Homo sapiens
ccagcatggggcagct

SEQ ID NO: 6895 - DNA, 16 bp, Homo sapiens
gcagctgccaggggcg

SEQ ID NO: 6896 - DNA, 16 bp, Homo sapiens
agctgccaggggcgca

SEQ ID NO: 6897 - DNA, 16 bp, Homo sapiens
ctgccaggggcgcagc

SEQ ID NO: 6898 - DNA, 16 bp, Homo sapiens
gccaggggcgcagccg

SEQ ID NO: 6899 - DNA, 16 bp, Homo sapiens
caggggcgcagccgac

SEQ ID NO: 6900 - DNA, 16 bp, Homo sapiens
ggggcgcagccgacag

SEQ ID NO: 6901 - DNA, 16 bp, Homo sapiens
ggcgcagccgacaggc

SEQ ID NO: 6902 - DNA, 16 bp, Homo sapiens
cgcagccgacaggcag

SEQ ID NO: 6903 - DNA, 16 bp, Homo sapiens
cagccgacaggcaggt

SEQ ID NO: 6904 - DNA, 16 bp, Homo sapiens
gccgacaggcaggtgt

SEQ ID NO: 6905 - DNA, 16 bp, Homo sapiens
cgacaggcaggtgttc

SEQ ID NO: 6906 - DNA, 16 bp, Homo sapiens
aggcaggtgttcggcg

SEQ ID NO: 6907 - DNA, 16 bp, Homo sapiens
ccaacaggtgcccagg

SEQ ID NO: 6908 - DNA, 16 bp, Homo sapiens
acaggtgcccaggcac

SEQ ID NO: 6909 - DNA, 16 bp, Homo sapiens
aggcactgggagggcg

SEQ ID NO: 6910 - DNA, 16 bp, Homo sapiens
gcactgggagggcggt

SEQ ID NO: 6911 - DNA, 16 bp, Homo sapiens
actgggagggcggtga

SEQ ID NO: 6912 - DNA, 16 bp, Homo sapiens
tgggagggcggtgact

SEQ ID NO: 6913 - DNA, 16 bp, Homo sapiens
ggagggcggtgactca

SEQ ID NO: 6914 - DNA, 16 bp, Homo sapiens
agggcggtgactcacg

SEQ ID NO: 6915 - DNA, 16 bp, Homo sapiens
gggagaaccagctttg

SEQ ID NO: 6916 - DNA, 16 bp, Homo sapiens
gagaaccagctttgca

SEQ ID NO: 6917 - DNA, 16 bp, Homo sapiens
gaaccagctttgcaga

SEQ ID NO: 6918 - DNA, 16 bp, Homo sapiens
cagctttgcagacagg

SEQ ID NO: 6919 - DNA, 16 bp, Homo sapiens
gctttgcagacaggcg

SEQ ID NO: 6920 - DNA, 16 bp, Homo sapiens
gatccaggagggacaa

SEQ ID NO: 6921 - DNA, 16 bp, Homo sapiens
tccaggagggacaact

SEQ ID NO: 6922 - DNA, 16 bp, Homo sapiens
caggagggacaacttt

SEQ ID NO: 6923 - DNA, 16 bp, Homo sapiens
ggagggacaactttgg

SEQ ID NO: 6924 - DNA, 16 bp, Homo sapiens
agggacaactttgggt

SEQ ID NO: 6925 - DNA, 16 bp, Homo sapiens
ggacaactttgggttc

SEQ ID NO: 6926 - DNA, 16 bp, Homo sapiens
caactttgggttcttc

SEQ ID NO: 6927 - DNA, 16 bp, Homo sapiens
ctttgggttcttctgg

SEQ ID NO: 6928 - DNA, 16 bp, Homo sapiens
tgggttcttctgggtg

SEQ ID NO: 6929 - DNA, 16 bp, Homo sapiens
cttttgtaggttctgc

SEQ ID NO: 6930 - DNA, 16 bp, Homo sapiens
tttgtaggttctgcac

SEQ ID NO: 6931 - DNA, 16 bp, Homo sapiens
tgtaggttctgcaccc

SEQ ID NO: 6932 - DNA, 16 bp, Homo sapiens
taggttctgcacccac

SEQ ID NO: 6933 - DNA, 16 bp, Homo sapiens
cctatgagccgtgtgg

SEQ ID NO: 6934 - DNA, 16 bp, Homo sapiens
tatgagccgtgtgggt

SEQ ID NO: 6935 - DNA, 16 bp, Homo sapiens
tgagccgtgtgggtca

SEQ ID NO: 6936 - DNA, 16 bp, Homo sapiens
agccgtgtgggtcagc

SEQ ID NO: 6937 - DNA, 16 bp, Homo sapiens
ccgtgtgggtcagcca

SEQ ID NO: 6938 - DNA, 16 bp, Homo sapiens
gtgtgggtcagccacc

SEQ ID NO: 6939 - DNA, 16 bp, Homo sapiens
gtgggtcagccaccat

SEQ ID NO: 6940 - DNA, 16 bp, Homo sapiens
gggtcagccaccattc

SEQ ID NO: 6941 - DNA, 16 bp, Homo sapiens
tccctgcgtcctttag

SEQ ID NO: 6942 - DNA, 16 bp, Homo sapiens
cctgcgtcctttagtt

SEQ ID NO: 6943 - DNA, 16 bp, Homo sapiens
gcgtcctttagttctc

SEQ ID NO: 6944 - DNA, 16 bp, Homo sapiens
ggggcttgggaccaat

SEQ ID NO: 6945 - DNA, 16 bp, Homo sapiens
cttgggaccaatgggc

SEQ ID NO: 6946 - DNA, 16 bp, Homo sapiens
tgggaccaatgggcgt

SEQ ID NO: 6947 - DNA, 16 bp, Homo sapiens
ggaccaatgggcgtgg

SEQ ID NO: 6948 - DNA, 16 bp, Homo sapiens
accaatgggcgtggtg

SEQ ID NO: 6949 - DNA, 16 bp, Homo sapiens
gggtggagttgggtct

SEQ ID NO: 6950 - DNA, 16 bp, Homo sapiens
aagaggggcgaggtga

SEQ ID NO: 6951 - DNA, 16 bp, Homo sapiens
gaggggcgaggtgagg

SEQ ID NO: 6952 - DNA, 16 bp, Homo sapiens
ggcgaggtgaggggct

SEQ ID NO: 6953 - DNA, 16 bp, Homo sapiens
cgtggggggctttgag

SEQ ID NO: 6954 - DNA, 16 bp, Homo sapiens
ggggctttgaggatcc

SEQ ID NO: 6955 - DNA, 16 bp, Homo sapiens
ggctttgaggatccgc

SEQ ID NO: 6956 - DNA, 16 bp, Homo sapiens
ctttgaggatccgcgc

SEQ ID NO: 6957 - DNA, 16 bp, Homo sapiens
ttgaggatccgcgccc

SEQ ID NO: 6958 - DNA, 16 bp, Homo sapiens
tctccggctgcagctc

SEQ ID NO: 6959 - DNA, 16 bp, Homo sapiens
tccggctgcagctcct

SEQ ID NO: 6960 - DNA, 16 bp, Homo sapiens
ggctgcagctcctccg

SEQ ID NO: 6961 - DNA, 16 bp, Homo sapiens
tgcagctcctccgggt

SEQ ID NO: 6962 - DNA, 16 bp, Homo sapiens
cagctcctccgggtgc

SEQ ID NO: 6963 - DNA, 16 bp, Homo sapiens
gctcctccgggtgccc

SEQ ID NO: 6964 - DNA, 16 bp, Homo sapiens
tcctccgggtgccctg

SEQ ID NO: 6965 - DNA, 16 bp, Homo sapiens
ctccgggtgccctgca

SEQ ID NO: 6966 - DNA, 16 bp, Homo sapiens
ccgggtgccctgcagg

SEQ ID NO: 6967 - DNA, 16 bp, Homo sapiens
tgccctgcaggtgtcg

SEQ ID NO: 6968 - DNA, 16 bp, Homo sapiens
ccctgcaggtgtcgtg

SEQ ID NO: 6969 - DNA, 16 bp, Homo sapiens
ctgcaggtgtcgtgct

SEQ ID NO: 6970 - DNA, 16 bp, Homo sapiens
gcaggtgtcgtgcttc

SEQ ID NO: 6971 - DNA, 16 bp, Homo sapiens
gatgagaactacctgg

SEQ ID NO: 6972 - DNA, 16 bp, Homo sapiens
tgagaactacctggtg

SEQ ID NO: 6973 - DNA, 16 bp, Homo sapiens
agaactacctggtgag

SEQ ID NO: 6974 - DNA, 16 bp, Homo sapiens
aactacctggtgagct

SEQ ID NO: 6975 - DNA, 16 bp, Homo sapiens
ctacctggtgagctcc

SEQ ID NO: 6976 - DNA, 16 bp, Homo sapiens
acctggtgagctccgg

SEQ ID NO: 6977 - DNA, 16 bp, Homo sapiens
ctggtgagctccgggc

SEQ ID NO: 6978 - DNA, 16 bp, Homo sapiens
gagaggaagctctagg

SEQ ID NO: 6979 - DNA, 16 bp, Homo sapiens
ggaagctctaggattg

SEQ ID NO: 6980 - DNA, 16 bp, Homo sapiens
gctctaggattggggg

SEQ ID NO: 6981 - DNA, 16 bp, Homo sapiens
tctaggattgggggtg

SEQ ID NO: 6982 - DNA, 16 bp, Homo sapiens
ggattgggggtgctgc

SEQ ID NO: 6983 - DNA, 16 bp, Homo sapiens
attgggggtgctgccc

SEQ ID NO: 6984 - DNA, 16 bp, Homo sapiens
gtaagagggtgtgtca

SEQ ID NO: 6985 - DNA, 16 bp, Homo sapiens
aagagggtgtgtcagg

SEQ ID NO: 6986 - DNA, 16 bp, Homo sapiens
gagggtgtgtcaggtg

SEQ ID NO: 6987 - DNA, 16 bp, Homo sapiens
gggtgtgtcaggtgga

SEQ ID NO: 6988 - DNA, 16 bp, Homo sapiens
gtgtgtcaggtggatg

SEQ ID NO: 6989 - DNA, 16 bp, Homo sapiens
gtgtcaggtggatgag

SEQ ID NO: 6990 - DNA, 16 bp, Homo sapiens
gtcaggtggatgaggg

SEQ ID NO: 6991 - DNA, 16 bp, Homo sapiens
caggtggatgaggggc

SEQ ID NO: 6992 - DNA, 16 bp, Homo sapiens
tggatgaggggccttc

SEQ ID NO: 6993 - DNA, 16 bp, Homo sapiens
ggggtctcttacctgg

SEQ ID NO: 6994 - DNA, 16 bp, Homo sapiens
ggtctcttacctggaa

SEQ ID NO: 6995 - DNA, 16 bp, Homo sapiens
ctcttacctggaatgg

SEQ ID NO: 6996 - DNA, 16 bp, Homo sapiens
cttacctggaatggga

SEQ ID NO: 6997 - DNA, 16 bp, Homo sapiens
tacctggaatgggata

SEQ ID NO: 6998 - DNA, 16 bp, Homo sapiens
cctggaatgggatagg

SEQ ID NO: 6999 - DNA, 16 bp, Homo sapiens
tggaatgggataggtc

SEQ ID NO: 7000 - DNA, 16 bp, Homo sapiens
gaatgggataggtctt

SEQ ID NO: 7001 - DNA, 16 bp, Homo sapiens
atgggataggtcttca

SEQ ID NO: 7002 - DNA, 16 bp, Homo sapiens
aattctaacggggcca

SEQ ID NO: 7003 - DNA, 16 bp, Homo sapiens
ttctaacggggccact

SEQ ID NO: 7004 - DNA, 16 bp, Homo sapiens
ctaacggggccactgc

SEQ ID NO: 7005 - DNA, 16 bp, Homo sapiens
aacggggccactgcct

SEQ ID NO: 7006 - DNA, 16 bp, Homo sapiens
cggggccactgcctag

SEQ ID NO: 7007 - DNA, 16 bp, Homo sapiens
gggccactgcctaggg

SEQ ID NO: 7008 - DNA, 16 bp, Homo sapiens
ggagtgtctgggacct

SEQ ID NO: 7009 - DNA, 16 bp, Homo sapiens
agtgtctgggacctat

SEQ ID NO: 7010 - DNA, 16 bp, Homo sapiens
tgtctgggacctattc

SEQ ID NO: 7011 - DNA, 16 bp, Homo sapiens
tctgggacctattctc

SEQ ID NO: 7012 - DNA, 16 bp, Homo sapiens
tgggacctattctctg

SEQ ID NO: 7013 - DNA, 20 bp, Homo sapiens
acaggcagacatgcagccag

SEQ ID NO: 7014 - DNA, 20 bp, Homo sapiens
cctgctcgaccttctcctgg

SEQ ID NO: 7015 - DNA, 20 bp, Homo sapiens
gagattgtcatggccataga

SEQ ID NO: 7016 - DNA, 20 bp, Homo sapiens
ggctacgtgcacagggacat

SEQ ID NO: 7017 - DNA, 20 bp, Homo sapiens
caggcgacttccggacacat

SEQ ID NO: 7018 - DNA, 20 bp, Homo sapiens
ctcacccggcagagcctgag

SEQ ID NO: 7019 - DNA, 20 bp, Homo sapiens
cgtggctgtgggccagtgcc

SEQ ID NO: 7020 - DNA, 20 bp, Homo sapiens
atttctttctttcggccagg

SEQ ID NO: 7021 - DNA, 20 bp, Homo sapiens
ggatcacagaccatttcttt

SEQ ID NO: 7022 - DNA, 20 bp, Homo sapiens
tcacagaccatttctttctt

SEQ ID NO: 7023 - DNA, 20 bp, Homo sapiens
accatttctttctttcggcc

SEQ ID NO: 7024 - DNA, 20 bp, Homo sapiens
ttctttcggccaggctgagg

SEQ ID NO: 7025 - DNA, 20 bp, Homo sapiens
tttcggccaggctgaggccc

SEQ ID NO: 7026 - DNA, 20 bp, Homo sapiens
cggccaggctgaggccctga

SEQ ID NO: 7027 - DNA, 20 bp, Homo sapiens
cgtggatgggcaaactgcag

SEQ ID NO: 7028 - DNA, 20 bp, Homo sapiens
ggatgggcaaactgcaggcc

SEQ ID NO: 7029 - DNA, 20 bp, Homo sapiens
tgggcaaactgcaggcctgg

SEQ ID NO: 7030 - DNA, 20 bp, Homo sapiens
aactgcaggcctgggaaggc

SEQ ID NO: 7031 - DNA, 20 bp, Homo sapiens
tgcaggcctgggaaggcagc

SEQ ID NO: 7032 - DNA, 20 bp, Homo sapiens
aggcctgggaaggcagcaag

SEQ ID NO: 7033 - DNA, 20 bp, Homo sapiens
gggaaggcagcaagccgggc

SEQ ID NO: 7034 - DNA, 20 bp, Homo sapiens
aaggcagcaagccgggccgt

SEQ ID NO: 7035 - DNA, 20 bp, Homo sapiens
gcagcaagccgggccgtccg

SEQ ID NO: 7036 - DNA, 20 bp, Homo sapiens
gcaagccgggccgtccgtgt

SEQ ID NO: 7037 - DNA, 20 bp, Homo sapiens
cgggccgtccgtgttccatc

SEQ ID NO: 7038 - DNA, 20 bp, Homo sapiens
gccgtccgtgttccatcctc

SEQ ID NO: 7039 - DNA, 20 bp, Homo sapiens
gtccgtgttccatcctccac

SEQ ID NO: 7040 - DNA, 20 bp, Homo sapiens
cccacctatcgttggttcgc

SEQ ID NO: 7041 - DNA, 20 bp, Homo sapiens
acctatcgttggttcgcaaa

SEQ ID NO: 7042 - DNA, 20 bp, Homo sapiens
tggttcgcaaagtgcaaagc

SEQ ID NO: 7043 - DNA, 20 bp, Homo sapiens
ttcgcaaagtgcaaagcttt

SEQ ID NO: 7044 - DNA, 20 bp, Homo sapiens
aagtgcaaagctttcttgtg

SEQ ID NO: 7045 - DNA, 20 bp, Homo sapiens
aaagctttcttgtgcatgac

SEQ ID NO: 7046 - DNA, 20 bp, Homo sapiens
cgccctgctctggggagcgt

SEQ ID NO: 7047 - DNA, 20 bp, Homo sapiens
gcgtctggcgcgatctctgc

SEQ ID NO: 7048 - DNA, 20 bp, Homo sapiens
tctggcgcgatctctgcctg

SEQ ID NO: 7049 - DNA, 20 bp, Homo sapiens
ggcgcgatctctgcctgctt

SEQ ID NO: 7050 - DNA, 20 bp, Homo sapiens
atctctgcctgcttactcgg

SEQ ID NO: 7051 - DNA, 20 bp, Homo sapiens
tctgcctgcttactcgggaa

SEQ ID NO: 7052 - DNA, 20 bp, Homo sapiens
tgcttactcgggaaatttgc

SEQ ID NO: 7053 - DNA, 20 bp, Homo sapiens
ttactcgggaaatttgcttt

SEQ ID NO: 7054 - DNA, 20 bp, Homo sapiens
gggaaatttgcttttgccaa

SEQ ID NO: 7055 - DNA, 20 bp, Homo sapiens
aaatttgcttttgccaaacc

SEQ ID NO: 7056 - DNA, 20 bp, Homo sapiens
tttgcttttgccaaacccgc

SEQ ID NO: 7057 - DNA, 20 bp, Homo sapiens
gcttttgccaaacccgcttt

SEQ ID NO: 7058 - DNA, 20 bp, Homo sapiens
gccaaacccgctttttcggg

SEQ ID NO: 7059 - DNA, 20 bp, Homo sapiens
aaacccgctttttcggggat

SEQ ID NO: 7060 - DNA, 20 bp, Homo sapiens
ccgctttttcggggatcccg

SEQ ID NO: 7061 - DNA, 20 bp, Homo sapiens
ctttttcggggatcccgcgc

SEQ ID NO: 7062 - DNA, 20 bp, Homo sapiens
tcctcacttgcgctgctctc

SEQ ID NO: 7063 - DNA, 20 bp, Homo sapiens
tcacttgcgctgctctcgga

SEQ ID NO: 7064 - DNA, 20 bp, Homo sapiens
cttgcgctgctctcggagcc

SEQ ID NO: 7065 - DNA, 20 bp, Homo sapiens
ccagccggctccgcccgctt

SEQ ID NO: 7066 - DNA, 20 bp, Homo sapiens
gccggctccgcccgcttcgg

SEQ ID NO: 7067 - DNA, 20 bp, Homo sapiens
tccgcccgcttcggcggttt

SEQ ID NO: 7068 - DNA, 20 bp, Homo sapiens
gcccgcttcggcggtttgga

SEQ ID NO: 7069 - DNA, 20 bp, Homo sapiens
cgcttcggcggtttggatat

SEQ ID NO: 7070 - DNA, 20 bp, Homo sapiens
ttcggcggtttggatattta

SEQ ID NO: 7071 - DNA, 20 bp, Homo sapiens
ggcggtttggatatttattg

SEQ ID NO: 7072 - DNA, 20 bp, Homo sapiens
ttggatatttattgacctcg

SEQ ID NO: 7073 - DNA, 20 bp, Homo sapiens
gatatttattgacctcgtcc

SEQ ID NO: 7074 - DNA, 20 bp, Homo sapiens
atttattgacctcgtcctcc

SEQ ID NO: 7075 - DNA, 20 bp, Homo sapiens
tgacctcgtcctccgactcg

SEQ ID NO: 7076 - DNA, 20 bp, Homo sapiens
cgtcctccgactcgctgaca

SEQ ID NO: 7077 - DNA, 20 bp, Homo sapiens
cctccgactcgctgacaggc

SEQ ID NO: 7078 - DNA, 20 bp, Homo sapiens
ccgactcgctgacaggctac

SEQ ID NO: 7079 - DNA, 20 bp, Homo sapiens
actcgctgacaggctacagg

SEQ ID NO: 7080 - DNA, 20 bp, Homo sapiens
cgctgacaggctacaggacc

SEQ ID NO: 7081 - DNA, 20 bp, Homo sapiens
cccgacattcctcggtattt

SEQ ID NO: 7082 - DNA, 20 bp, Homo sapiens
gacattcctcggtatttatt

SEQ ID NO: 7083 - DNA, 20 bp, Homo sapiens
attcctcggtatttattgtc

SEQ ID NO: 7084 - DNA, 20 bp, Homo sapiens
tcttcgactccggggccccg

SEQ ID NO: 7085 - DNA, 20 bp, Homo sapiens
cgactccggggccccgttgg

SEQ ID NO: 7086 - DNA, 20 bp, Homo sapiens
actccggggccccgttggaa

SEQ ID NO: 7087 - DNA, 20 bp, Homo sapiens
ccggggccccgttggaagac

SEQ ID NO: 7088 - DNA, 20 bp, Homo sapiens
ggggccccgttggaagactg

SEQ ID NO: 7089 - DNA, 20 bp, Homo sapiens
ggccccgttggaagactgag

SEQ ID NO: 7090 - DNA, 20 bp, Homo sapiens
cccgttggaagactgagtgc

SEQ ID NO: 7091 - DNA, 20 bp, Homo sapiens
ggaagactgagtgcccgggg

SEQ ID NO: 7092 - DNA, 20 bp, Homo sapiens
aagactgagtgcccggggca

SEQ ID NO: 7093 - DNA, 20 bp, Homo sapiens
gactgagtgcccggggcacg

SEQ ID NO: 7094 - DNA, 20 bp, Homo sapiens
gagtgcccggggcacggcac

SEQ ID NO: 7095 - DNA, 20 bp, Homo sapiens
tgcccggggcacggcacaga

SEQ ID NO: 7096 - DNA, 20 bp, Homo sapiens
ccggggcacggcacagaagc

SEQ ID NO: 7097 - DNA, 20 bp, Homo sapiens
gggcacggcacagaagccgc

SEQ ID NO: 7098 - DNA, 20 bp, Homo sapiens
gcacggcacagaagccgcgc

SEQ ID NO: 7099 - DNA, 20 bp, Homo sapiens
acggcacagaagccgcgccc

SEQ ID NO: 7100 - DNA, 20 bp, Homo sapiens
cagaagccgcgcccaccgcc

SEQ ID NO: 7101 - DNA, 20 bp, Homo sapiens
agccgcgcccaccgcctgcc

SEQ ID NO: 7102 - DNA, 20 bp, Homo sapiens
ccgcgcccaccgcctgccag

SEQ ID NO: 7103 - DNA, 20 bp, Homo sapiens
gcgcccaccgcctgccagtt

SEQ ID NO: 7104 - DNA, 20 bp, Homo sapiens
cccaccgcctgccagttcac

SEQ ID NO: 7105 - DNA, 20 bp, Homo sapiens
ccgcctgccagttcacaacc

SEQ ID NO: 7106 - DNA, 20 bp, Homo sapiens
gcctgccagttcacaaccgc

SEQ ID NO: 7107 - DNA, 20 bp, Homo sapiens
gttcacaaccgctccgagcg

SEQ ID NO: 7108 - DNA, 20 bp, Homo sapiens
acaaccgctccgagcgtggg

SEQ ID NO: 7109 - DNA, 20 bp, Homo sapiens
accgctccgagcgtgggtct

SEQ ID NO: 7110 - DNA, 20 bp, Homo sapiens
gctccgagcgtgggtctccg

SEQ ID NO: 7111 - DNA, 20 bp, Homo sapiens
ccgagcgtgggtctccgccc

SEQ ID NO: 7112 - DNA, 20 bp, Homo sapiens
agcgtgggtctccgcccagc

SEQ ID NO: 7113 - DNA, 20 bp, Homo sapiens
gtgggtctccgcccagctcc

SEQ ID NO: 7114 - DNA, 20 bp, Homo sapiens
gggtctccgcccagctccag

SEQ ID NO: 7115 - DNA, 20 bp, Homo sapiens
tctccgcccagctccagtcc

SEQ ID NO: 7116 - DNA, 20 bp, Homo sapiens
tccgcccagctccagtcctg

SEQ ID NO: 7117 - DNA, 20 bp, Homo sapiens
cccagctccagtcctgtgat

SEQ ID NO: 7118 - DNA, 20 bp, Homo sapiens
cctgtgatccgggcccgccc

SEQ ID NO: 7119 - DNA, 20 bp, Homo sapiens
tgtgatccgggcccgccccc

SEQ ID NO: 7120 - DNA, 20 bp, Homo sapiens
gaggggccatggtgctgcct

SEQ ID NO: 7121 - DNA, 20 bp, Homo sapiens
ccagcagctggtgttggacc

SEQ ID NO: 7122 - DNA, 20 bp, Homo sapiens
cgagattctgaaggtgatcg

SEQ ID NO: 7123 - DNA, 20 bp, Homo sapiens
ccatgaagatcatgaacaag

SEQ ID NO: 7124 - DNA, 20 bp, Homo sapiens
ggacgtgttggtgaatgggg

SEQ ID NO: 7125 - DNA, 20 bp, Homo sapiens
ggaccggcggtggatcacgc

SEQ ID NO: 7126 - DNA, 20 bp, Homo sapiens
acctggtcatggagtattac

SEQ ID NO: 7127 - DNA, 20 bp, Homo sapiens
cggggacctgctgacactgc

SEQ ID NO: 7128 - DNA, 20 bp, Homo sapiens
tcatggccatagactcggtg

SEQ ID NO: 7129 - DNA, 20 bp, Homo sapiens
gtgcaccggcttggctacgt

SEQ ID NO: 7130 - DNA, 20 bp, Homo sapiens
ctggaccgctgtggccacat

SEQ ID NO: 7131 - DNA, 20 bp, Homo sapiens
tctgccgctggtggacgaag

SEQ ID NO: 7132 - DNA, 20 bp, Homo sapiens
cgctggtggacgaaggggtc

SEQ ID NO: 7133 - DNA, 20 bp, Homo sapiens
ctgggccggggtggagcagg

SEQ ID NO: 7134 - DNA, 20 bp, Homo sapiens
ggtggagcaggcgacttccg

SEQ ID NO: 7135 - DNA, 20 bp, Homo sapiens
ctcgactgggatggtctccg

SEQ ID NO: 7136 - DNA, 20 bp, Homo sapiens
ctactcctgcatggccctca

SEQ ID NO: 7137 - DNA, 20 bp, Homo sapiens
ccacacccatggaactggag

SEQ ID NO: 7138 - DNA, 20 bp, Homo sapiens
tgagccacacgtgcaagcgc

SEQ ID NO: 7139 - DNA, 20 bp, Homo sapiens
gatgaaacagctgaagtggc

SEQ ID NO: 7140 - DNA, 20 bp, Homo sapiens
cctgcggcagaggctgaggc

SEQ ID NO: 7141 - DNA, 20 bp, Homo sapiens
tgaggccgaggtgacgctgc

SEQ ID NO: 7142 - DNA, 20 bp, Homo sapiens
cacccggcagagcctgagcc

SEQ ID NO: 7143 - DNA, 20 bp, Homo sapiens
cgcgaggcagaggctcggaa

SEQ ID NO: 7144 - DNA, 20 bp, Homo sapiens
agaggctcggaaccgggacc

SEQ ID NO: 7145 - DNA, 20 bp, Homo sapiens
cggcagttgcaggagcggat

SEQ ID NO: 7146 - DNA, 20 bp, Homo sapiens
gcaggagcggatggagttgc

SEQ ID NO: 7147 - DNA, 20 bp, Homo sapiens
cccgggccacggatccacct

SEQ ID NO: 7148 - DNA, 20 bp, Homo sapiens
ggcacggcacagaagccgcg

SEQ ID NO: 7149 - DNA, 20 bp, Homo sapiens
caggcctgggaaggcagcaa

SEQ ID NO: 7150 - DNA, 20 bp, Homo sapiens
catatgtctggccctcagtg

SEQ ID NO: 7151 - DNA, 20 bp, Homo sapiens
acctgcatctgaatctagag

SEQ ID NO: 7152 - DNA, 20 bp, Homo sapiens
ctggacaggggctgccaggc

SEQ ID NO: 7153 - DNA, 20 bp, Homo sapiens
tggacaggggctgccaggcc

SEQ ID NO: 7154 - DNA, 20 bp, Homo sapiens
ggacaggggctgccaggccc

SEQ ID NO: 7155 - DNA, 20 bp, Homo sapiens
ccggcccggggaggggccat

SEQ ID NO: 7156 - DNA, 20 bp, Homo sapiens
cggcccggggaggggccatg

SEQ ID NO: 7157 - DNA, 20 bp, Homo sapiens
ggcccggggaggggccatgg

SEQ ID NO: 7158 - DNA, 20 bp, Homo sapiens
gcccggggaggggccatggt

SEQ ID NO: 7159 - DNA, 20 bp, Homo sapiens
cccggggaggggccatggtg

SEQ ID NO: 7160 - DNA, 20 bp, Homo sapiens
ccggggaggggccatggtgc

SEQ ID NO: 7161 - DNA, 20 bp, Homo sapiens
cggggaggggccatggtgct

SEQ ID NO: 7162 - DNA, 20 bp, Homo sapiens
ggggaggggccatggtgctg

SEQ ID NO: 7163 - DNA, 20 bp, Homo sapiens
gggaggggccatggtgctgc

SEQ ID NO: 7164 - DNA, 20 bp, Homo sapiens
ggaggggccatggtgctgcc

SEQ ID NO: 7165 - DNA, 20 bp, Homo sapiens
aggggccatggtgctgcctg

SEQ ID NO: 7166 - DNA, 20 bp, Homo sapiens
ggggccatggtgctgcctgt

SEQ ID NO: 7167 - DNA, 20 bp, Homo sapiens
ggccatggtgctgcctgtcc

SEQ ID NO: 7168 - DNA, 20 bp, Homo sapiens
gccatggtgctgcctgtcca

SEQ ID NO: 7169 - DNA, 20 bp, Homo sapiens
ccatggtgctgcctgtccaa

SEQ ID NO: 7170 - DNA, 20 bp, Homo sapiens
catggtgctgcctgtccaac

SEQ ID NO: 7171 - DNA, 20 bp, Homo sapiens
atggtgctgcctgtccaaca

SEQ ID NO: 7172 - DNA, 20 bp, Homo sapiens
tggtgctgcctgtccaacat

SEQ ID NO: 7173 - DNA, 20 bp, Homo sapiens
ggtgctgcctgtccaacatg

SEQ ID NO: 7174 - DNA, 20 bp, Homo sapiens
gtgctgcctgtccaacatgt

SEQ ID NO: 7175 - DNA, 20 bp, Homo sapiens
tgctgcctgtccaacatgtc

SEQ ID NO: 7176 - DNA, 20 bp, Homo sapiens
gctgcctgtccaacatgtca

SEQ ID NO: 7177 - DNA, 20 bp, Homo sapiens
ctgcctgtccaacatgtcag

SEQ ID NO: 7178 - DNA, 20 bp, Homo sapiens
tgcctgtccaacatgtcagc

SEQ ID NO: 7179 - DNA, 20 bp, Homo sapiens
gcctgtccaacatgtcagcc

SEQ ID NO: 7180 - DNA, 20 bp, Homo sapiens
cctgtccaacatgtcagccg

SEQ ID NO: 7181 - DNA, 20 bp, Homo sapiens
ctgtccaacatgtcagccga

SEQ ID NO: 7182 - DNA, 20 bp, Homo sapiens
tgtccaacatgtcagccgag

SEQ ID NO: 7183 - DNA, 20 bp, Homo sapiens
gtccaacatgtcagccgagg

SEQ ID NO: 7184 - DNA, 20 bp, Homo sapiens
tccaacatgtcagccgaggt

SEQ ID NO: 7185 - DNA, 20 bp, Homo sapiens
ccaacatgtcagccgaggtg

SEQ ID NO: 7186 - DNA, 20 bp, Homo sapiens
caacatgtcagccgaggtgc

SEQ ID NO: 7187 - DNA, 20 bp, Homo sapiens
aacatgtcagccgaggtgcg

SEQ ID NO: 7188 - DNA, 20 bp, Homo sapiens
acatgtcagccgaggtgcgg

SEQ ID NO: 7189 - DNA, 20 bp, Homo sapiens
catgtcagccgaggtgcggc

SEQ ID NO: 7190 - DNA, 20 bp, Homo sapiens
atgtcagccgaggtgcggct

SEQ ID NO: 7191 - DNA, 20 bp, Homo sapiens
tgtcagccgaggtgcggctg

SEQ ID NO: 7192 - DNA, 20 bp, Homo sapiens
gtcagccgaggtgcggctga

SEQ ID NO: 7193 - DNA, 20 bp, Homo sapiens
tcagccgaggtgcggctgag

SEQ ID NO: 7194 - DNA, 20 bp, Homo sapiens
cagccgaggtgcggctgagg

SEQ ID NO: 7195 - DNA, 20 bp, Homo sapiens
agccgaggtgcggctgaggc

SEQ ID NO: 7196 - DNA, 20 bp, Homo sapiens
gctccagcagctggtgttgg

SEQ ID NO: 7197 - DNA, 20 bp, Homo sapiens
ctccagcagctggtgttgga

SEQ ID NO: 7198 - DNA, 20 bp, Homo sapiens
tccagcagctggtgttggac

SEQ ID NO: 7199 - DNA, 20 bp, Homo sapiens
cagcagctggtgttggaccc

SEQ ID NO: 7200 - DNA, 20 bp, Homo sapiens
ggcttcctggggctggagcc

SEQ ID NO: 7201 - DNA, 20 bp, Homo sapiens
gcttcctggggctggagccc

SEQ ID NO: 7202 - DNA, 20 bp, Homo sapiens
ccctgctcgaccttctcctg

SEQ ID NO: 7203 - DNA, 20 bp, Homo sapiens
ctgctcgaccttctcctggg

SEQ ID NO: 7204 - DNA, 20 bp, Homo sapiens
tgctcgaccttctcctgggc

SEQ ID NO: 7205 - DNA, 20 bp, Homo sapiens
gctcgaccttctcctgggcg

SEQ ID NO: 7206 - DNA, 20 bp, Homo sapiens
ctcgaccttctcctgggcgt

SEQ ID NO: 7207 - DNA, 20 bp, Homo sapiens
gcctccgaactggcccagga

SEQ ID NO: 7208 - DNA, 20 bp, Homo sapiens
cctccgaactggcccaggac

SEQ ID NO: 7209 - DNA, 20 bp, Homo sapiens
ctccgaactggcccaggaca

SEQ ID NO: 7210 - DNA, 20 bp, Homo sapiens
tccgaactggcccaggacaa

SEQ ID NO: 7211 - DNA, 20 bp, Homo sapiens
ccgaactggcccaggacaag

SEQ ID NO: 7212 - DNA, 20 bp, Homo sapiens
cgaactggcccaggacaagt

SEQ ID NO: 7213 - DNA, 20 bp, Homo sapiens
gaactggcccaggacaagta

SEQ ID NO: 7214 - DNA, 20 bp, Homo sapiens
aactggcccaggacaagtac

SEQ ID NO: 7215 - DNA, 20 bp, Homo sapiens
actggcccaggacaagtacg

SEQ ID NO: 7216 - DNA, 20 bp, Homo sapiens
cgtggccgacttcttgcagt

SEQ ID NO: 7217 - DNA, 20 bp, Homo sapiens
tggccgacttcttgcagtgg

SEQ ID NO: 7218 - DNA, 20 bp, Homo sapiens
ggccgacttcttgcagtggg

SEQ ID NO: 7219 - DNA, 20 bp, Homo sapiens
gccgacttcttgcagtgggc

SEQ ID NO: 7220 - DNA, 20 bp, Homo sapiens
ccgacttcttgcagtgggcg

SEQ ID NO: 7221 - DNA, 20 bp, Homo sapiens
cgacttcttgcagtgggcgg

SEQ ID NO: 7222 - DNA, 20 bp, Homo sapiens
gacttcttgcagtgggcgga

SEQ ID NO: 7223 - DNA, 20 bp, Homo sapiens
acttcttgcagtgggcggag

SEQ ID NO: 7224 - DNA, 20 bp, Homo sapiens
cttcttgcagtgggcggagc

SEQ ID NO: 7225 - DNA, 20 bp, Homo sapiens
ttcttgcagtgggcggagcc

SEQ ID NO: 7226 - DNA, 20 bp, Homo sapiens
tcttgcagtgggcggagccc

SEQ ID NO: 7227 - DNA, 20 bp, Homo sapiens
cttgcagtgggcggagccca

SEQ ID NO: 7228 - DNA, 20 bp, Homo sapiens
ttgcagtgggcggagcccat

SEQ ID NO: 7229 - DNA, 20 bp, Homo sapiens
tgcagtgggcggagcccatc

SEQ ID NO: 7230 - DNA, 20 bp, Homo sapiens
gcagtgggcggagcccatcg

SEQ ID NO: 7231 - DNA, 20 bp, Homo sapiens
cagtgggcggagcccatcgt

SEQ ID NO: 7232 - DNA, 20 bp, Homo sapiens
agtgggcggagcccatcgtg

SEQ ID NO: 7233 - DNA, 20 bp, Homo sapiens
gtgggcggagcccatcgtgg

SEQ ID NO: 7234 - DNA, 20 bp, Homo sapiens
tgggcggagcccatcgtggt

SEQ ID NO: 7235 - DNA, 20 bp, Homo sapiens
gggcggagcccatcgtggtg

SEQ ID NO: 7236 - DNA, 20 bp, Homo sapiens
ggcggagcccatcgtggtga

SEQ ID NO: 7237 - DNA, 20 bp, Homo sapiens
gcggagcccatcgtggtgag

SEQ ID NO: 7238 - DNA, 20 bp, Homo sapiens
cggagcccatcgtggtgagg

SEQ ID NO: 7239 - DNA, 20 bp, Homo sapiens
ggagcccatcgtggtgaggc

SEQ ID NO: 7240 - DNA, 20 bp, Homo sapiens
gagcccatcgtggtgaggct

SEQ ID NO: 7241 - DNA, 20 bp, Homo sapiens
agcccatcgtggtgaggctt

SEQ ID NO: 7242 - DNA, 20 bp, Homo sapiens
gcccatcgtggtgaggctta

SEQ ID NO: 7243 - DNA, 20 bp, Homo sapiens
cccatcgtggtgaggcttaa

SEQ ID NO: 7244 - DNA, 20 bp, Homo sapiens
ccatcgtggtgaggcttaag

SEQ ID NO: 7245 - DNA, 20 bp, Homo sapiens
catcgtggtgaggcttaagg

SEQ ID NO: 7246 - DNA, 20 bp, Homo sapiens
atcgtggtgaggcttaagga

SEQ ID NO: 7247 - DNA, 20 bp, Homo sapiens
tcgtggtgaggcttaaggag

SEQ ID NO: 7248 - DNA, 20 bp, Homo sapiens
cgtggtgaggcttaaggagg

SEQ ID NO: 7249 - DNA, 20 bp, Homo sapiens
gtggtgaggcttaaggaggt

SEQ ID NO: 7250 - DNA, 20 bp, Homo sapiens
tggtgaggcttaaggaggtc

SEQ ID NO: 7251 - DNA, 20 bp, Homo sapiens
ggtgaggcttaaggaggtcc

SEQ ID NO: 7252 - DNA, 20 bp, Homo sapiens
gtgaggcttaaggaggtccg

SEQ ID NO: 7253 - DNA, 20 bp, Homo sapiens
tgaggcttaaggaggtccga

SEQ ID NO: 7254 - DNA, 20 bp, Homo sapiens
gaggcttaaggaggtccgac

SEQ ID NO: 7255 - DNA, 20 bp, Homo sapiens
ggcttaaggaggtccgactg

SEQ ID NO: 7256 - DNA, 20 bp, Homo sapiens
gcttaaggaggtccgactgc

SEQ ID NO: 7257 - DNA, 20 bp, Homo sapiens
cttaaggaggtccgactgca

SEQ ID NO: 7258 - DNA, 20 bp, Homo sapiens
cgacttcgagattctgaagg

SEQ ID NO: 7259 - DNA, 20 bp, Homo sapiens
gacttcgagattctgaaggt

SEQ ID NO: 7260 - DNA, 20 bp, Homo sapiens
cttcgagattctgaaggtga

SEQ ID NO: 7261 - DNA, 20 bp, Homo sapiens
ttcgagattctgaaggtgat

SEQ ID NO: 7262 - DNA, 20 bp, Homo sapiens
tcgagattctgaaggtgatc

SEQ ID NO: 7263 - DNA, 20 bp, Homo sapiens
gagattctgaaggtgatcgg

SEQ ID NO: 7264 - DNA, 20 bp, Homo sapiens
agattctgaaggtgatcgga

SEQ ID NO: 7265 - DNA, 20 bp, Homo sapiens
gattctgaaggtgatcggac

SEQ ID NO: 7266 - DNA, 20 bp, Homo sapiens
attctgaaggtgatcggacg

SEQ ID NO: 7267 - DNA, 20 bp, Homo sapiens
gtgaagatgaagcagacggg

SEQ ID NO: 7268 - DNA, 20 bp, Homo sapiens
tgaagatgaagcagacgggc

SEQ ID NO: 7269 - DNA, 20 bp, Homo sapiens
gaagatgaagcagacgggcc

SEQ ID NO: 7270 - DNA, 20 bp, Homo sapiens
aagatgaagcagacgggcca

SEQ ID NO: 7271 - DNA, 20 bp, Homo sapiens
agatgaagcagacgggccag

SEQ ID NO: 7272 - DNA, 20 bp, Homo sapiens
gatgaagcagacgggccagg

SEQ ID NO: 7273 - DNA, 20 bp, Homo sapiens
atgaagcagacgggccaggt

SEQ ID NO: 7274 - DNA, 20 bp, Homo sapiens
tgaagcagacgggccaggtg

SEQ ID NO: 7275 - DNA, 20 bp, Homo sapiens
gaagcagacgggccaggtgt

SEQ ID NO: 7276 - DNA, 20 bp, Homo sapiens
aagcagacgggccaggtgta

SEQ ID NO: 7277 - DNA, 20 bp, Homo sapiens
gccatgaagatcatgaacaa

SEQ ID NO: 7278 - DNA, 20 bp, Homo sapiens
catgaagatcatgaacaagt

SEQ ID NO: 7279 - DNA, 20 bp, Homo sapiens
atgaagatcatgaacaagtg

SEQ ID NO: 7280 - DNA, 20 bp, Homo sapiens
tgaagatcatgaacaagtgg

SEQ ID NO: 7281 - DNA, 20 bp, Homo sapiens
gaagatcatgaacaagtggg

SEQ ID NO: 7282 - DNA, 20 bp, Homo sapiens
aagatcatgaacaagtggga

SEQ ID NO: 7283 - DNA, 20 bp, Homo sapiens
agatcatgaacaagtgggac

SEQ ID NO: 7284 - DNA, 20 bp, Homo sapiens
gatcatgaacaagtgggaca

SEQ ID NO: 7285 - DNA, 20 bp, Homo sapiens
atcatgaacaagtgggacat

SEQ ID NO: 7286 - DNA, 20 bp, Homo sapiens
tcatgaacaagtgggacatg

SEQ ID NO: 7287 - DNA, 20 bp, Homo sapiens
catgaacaagtgggacatgc

SEQ ID NO: 7288 - DNA, 20 bp, Homo sapiens
atgaacaagtgggacatgct

SEQ ID NO: 7289 - DNA, 20 bp, Homo sapiens
tgaacaagtgggacatgctg

SEQ ID NO: 7290 - DNA, 20 bp, Homo sapiens
gaacaagtgggacatgctga

SEQ ID NO: 7291 - DNA, 20 bp, Homo sapiens
aacaagtgggacatgctgaa

SEQ ID NO: 7292 - DNA, 20 bp, Homo sapiens
acaagtgggacatgctgaag

SEQ ID NO: 7293 - DNA, 20 bp, Homo sapiens
caagtgggacatgctgaaga

SEQ ID NO: 7294 - DNA, 20 bp, Homo sapiens
agtgggacatgctgaagagg

SEQ ID NO: 7295 - DNA, 20 bp, Homo sapiens
gtgggacatgctgaagaggg

SEQ ID NO: 7296 - DNA, 20 bp, Homo sapiens
tgggacatgctgaagagggg

SEQ ID NO: 7297 - DNA, 20 bp, Homo sapiens
gggacatgctgaagaggggc

SEQ ID NO: 7298 - DNA, 20 bp, Homo sapiens
ggacatgctgaagaggggcg

SEQ ID NO: 7299 - DNA, 20 bp, Homo sapiens
gacatgctgaagaggggcga

SEQ ID NO: 7300 - DNA, 20 bp, Homo sapiens
acatgctgaagaggggcgag

SEQ ID NO: 7301 - DNA, 20 bp, Homo sapiens
catgctgaagaggggcgagg

SEQ ID NO: 7302 - DNA, 20 bp, Homo sapiens
atgctgaagaggggcgaggt

SEQ ID NO: 7303 - DNA, 20 bp, Homo sapiens
tgctgaagaggggcgaggtg

SEQ ID NO: 7304 - DNA, 20 bp, Homo sapiens
gctgaagaggggcgaggtgt

SEQ ID NO: 7305 - DNA, 20 bp, Homo sapiens
ctgaagaggggcgaggtgtc

SEQ ID NO: 7306 - DNA, 20 bp, Homo sapiens
tgtggccacatccgcctggc

SEQ ID NO: 7307 - DNA, 20 bp, Homo sapiens
ggcagatggaacggtgcggt

SEQ ID NO: 7308 - DNA, 20 bp, Homo sapiens
gcagatggaacggtgcggtc

SEQ ID NO: 7309 - DNA, 20 bp, Homo sapiens
cccgagatcctgcaggctgt

SEQ ID NO: 7310 - DNA, 20 bp, Homo sapiens
ccgagatcctgcaggctgtg

SEQ ID NO: 7311 - DNA, 20 bp, Homo sapiens
cgagatcctgcaggctgtgg

SEQ ID NO: 7312 - DNA, 20 bp, Homo sapiens
gagatcctgcaggctgtggg

SEQ ID NO: 7313 - DNA, 20 bp, Homo sapiens
agatcctgcaggctgtgggc

SEQ ID NO: 7314 - DNA, 20 bp, Homo sapiens
gatcctgcaggctgtgggcg

SEQ ID NO: 7315 - DNA, 20 bp, Homo sapiens
atcctgcaggctgtgggcgg

SEQ ID NO: 7316 - DNA, 20 bp, Homo sapiens
tcctgcaggctgtgggcggt

SEQ ID NO: 7317 - DNA, 20 bp, Homo sapiens
cctgcaggctgtgggcggtg

SEQ ID NO: 7318 - DNA, 20 bp, Homo sapiens
ctgcaggctgtgggcggtgg

SEQ ID NO: 7319 - DNA, 20 bp, Homo sapiens
tgcaggctgtgggcggtggg

SEQ ID NO: 7320 - DNA, 20 bp, Homo sapiens
gcaggctgtgggcggtgggc

SEQ ID NO: 7321 - DNA, 20 bp, Homo sapiens
caggctgtgggcggtgggcc

SEQ ID NO: 7322 - DNA, 20 bp, Homo sapiens
aggctgtgggcggtgggcct

SEQ ID NO: 7323 - DNA, 20 bp, Homo sapiens
ggctgtgggcggtgggcctg

SEQ ID NO: 7324 - DNA, 20 bp, Homo sapiens
gctgtgggcggtgggcctgg

SEQ ID NO: 7325 - DNA, 20 bp, Homo sapiens
ctgtgggcggtgggcctggg

SEQ ID NO: 7326 - DNA, 20 bp, Homo sapiens
tgtgggcggtgggcctggga

SEQ ID NO: 7327 - DNA, 20 bp, Homo sapiens
gtgggcggtgggcctgggac

SEQ ID NO: 7328 - DNA, 20 bp, Homo sapiens
tgggcggtgggcctgggaca

SEQ ID NO: 7329 - DNA, 20 bp, Homo sapiens
gggcggtgggcctgggacag

SEQ ID NO: 7330 - DNA, 20 bp, Homo sapiens
ggcggtgggcctgggacagg

SEQ ID NO: 7331 - DNA, 20 bp, Homo sapiens
gcggtgggcctgggacaggc

SEQ ID NO: 7332 - DNA, 20 bp, Homo sapiens
cggtgggcctgggacaggca

SEQ ID NO: 7333 - DNA, 20 bp, Homo sapiens
ggtgggcctgggacaggcag

SEQ ID NO: 7334 - DNA, 20 bp, Homo sapiens
gtgggcctgggacaggcagc

SEQ ID NO: 7335 - DNA, 20 bp, Homo sapiens
tgggcctgggacaggcagct

SEQ ID NO: 7336 - DNA, 20 bp, Homo sapiens
gggcctgggacaggcagcta

SEQ ID NO: 7337 - DNA, 20 bp, Homo sapiens
ggcctgggacaggcagctac

SEQ ID NO: 7338 - DNA, 20 bp, Homo sapiens
gcctgggacaggcagctacg

SEQ ID NO: 7339 - DNA, 20 bp, Homo sapiens
cctgggacaggcagctacgg

SEQ ID NO: 7340 - DNA, 20 bp, Homo sapiens
ctgggacaggcagctacggg

SEQ ID NO: 7341 - DNA, 20 bp, Homo sapiens
tgggacaggcagctacgggc

SEQ ID NO: 7342 - DNA, 20 bp, Homo sapiens
gggacaggcagctacgggcc

SEQ ID NO: 7343 - DNA, 20 bp, Homo sapiens
ttcgcctatgaaatgttcta

SEQ ID NO: 7344 - DNA, 20 bp, Homo sapiens
cgcggattccacggcggaga

SEQ ID NO: 7345 - DNA, 20 bp, Homo sapiens
gcggattccacggcggagac

SEQ ID NO: 7346 - DNA, 20 bp, Homo sapiens
cggattccacggcggagacc

SEQ ID NO: 7347 - DNA, 20 bp, Homo sapiens
ggattccacggcggagacct

SEQ ID NO: 7348 - DNA, 20 bp, Homo sapiens
gattccacggcggagaccta

SEQ ID NO: 7349 - DNA, 20 bp, Homo sapiens
ggcaagatcgtccactacaa

SEQ ID NO: 7350 - DNA, 20 bp, Homo sapiens
gcaagatcgtccactacaag

SEQ ID NO: 7351 - DNA, 20 bp, Homo sapiens
caagatcgtccactacaagg

SEQ ID NO: 7352 - DNA, 20 bp, Homo sapiens
aagatcgtccactacaagga

SEQ ID NO: 7353 - DNA, 20 bp, Homo sapiens
agatcgtccactacaaggag

SEQ ID NO: 7354 - DNA, 20 bp, Homo sapiens
gatcgtccactacaaggagc

SEQ ID NO: 7355 - DNA, 20 bp, Homo sapiens
atcgtccactacaaggagca

SEQ ID NO: 7356 - DNA, 20 bp, Homo sapiens
tcgtccactacaaggagcac

SEQ ID NO: 7357 - DNA, 20 bp, Homo sapiens
cgtccactacaaggagcacc

SEQ ID NO: 7358 - DNA, 20 bp, Homo sapiens
gtccactacaaggagcacct

SEQ ID NO: 7359 - DNA, 20 bp, Homo sapiens
tccactacaaggagcacctc

SEQ ID NO: 7360 - DNA, 20 bp, Homo sapiens
ccactacaaggagcacctct

SEQ ID NO: 7361 - DNA, 20 bp, Homo sapiens
cactacaaggagcacctctc

SEQ ID NO: 7362 - DNA, 20 bp, Homo sapiens
actacaaggagcacctctct

SEQ ID NO: 7363 - DNA, 20 bp, Homo sapiens
ctacaaggagcacctctctc

SEQ ID NO: 7364 - DNA, 20 bp, Homo sapiens
tacaaggagcacctctctct

SEQ ID NO: 7365 - DNA, 20 bp, Homo sapiens
acaaggagcacctctctctg

SEQ ID NO: 7366 - DNA, 20 bp, Homo sapiens
aaggagcacctctctctgcc

SEQ ID NO: 7367 - DNA, 20 bp, Homo sapiens
aggagcacctctctctgccg

SEQ ID NO: 7368 - DNA, 20 bp, Homo sapiens
ggagcacctctctctgccgc

SEQ ID NO: 7369 - DNA, 20 bp, Homo sapiens
gagcacctctctctgccgct

SEQ ID NO: 7370 - DNA, 20 bp, Homo sapiens
agcacctctctctgccgctg

SEQ ID NO: 7371 - DNA, 20 bp, Homo sapiens
gcacctctctctgccgctgg

SEQ ID NO: 7372 - DNA, 20 bp, Homo sapiens
cccggagacacggctgggcc

SEQ ID NO: 7373 - DNA, 20 bp, Homo sapiens
ccggagacacggctgggccg

SEQ ID NO: 7374 - DNA, 20 bp, Homo sapiens
cggagacacggctgggccgg

SEQ ID NO: 7375 - DNA, 20 bp, Homo sapiens
ggagacacggctgggccggg

SEQ ID NO: 7376 - DNA, 20 bp, Homo sapiens
gagacacggctgggccgggg

SEQ ID NO: 7377 - DNA, 20 bp, Homo sapiens
agacacggctgggccggggt

SEQ ID NO: 7378 - DNA, 20 bp, Homo sapiens
gacacggctgggccggggtg

SEQ ID NO: 7379 - DNA, 20 bp, Homo sapiens
acacggctgggccggggtgg

SEQ ID NO: 7380 - DNA, 20 bp, Homo sapiens
cacggctgggccggggtgga

SEQ ID NO: 7381 - DNA, 20 bp, Homo sapiens
acggctgggccggggtggag

SEQ ID NO: 7382 - DNA, 20 bp, Homo sapiens
cggctgggccggggtggagc

SEQ ID NO: 7383 - DNA, 20 bp, Homo sapiens
ggctgggccggggtggagca

SEQ ID NO: 7384 - DNA, 20 bp, Homo sapiens
gctgggccggggtggagcag

SEQ ID NO: 7385 - DNA, 20 bp, Homo sapiens
gacttccggacacatccctt

SEQ ID NO: 7386 - DNA, 20 bp, Homo sapiens
acttccggacacatcccttc

SEQ ID NO: 7387 - DNA, 20 bp, Homo sapiens
cttccggacacatcccttct

SEQ ID NO: 7388 - DNA, 20 bp, Homo sapiens
ttccggacacatcccttctt

SEQ ID NO: 7389 - DNA, 20 bp, Homo sapiens
tccggacacatcccttcttc

SEQ ID NO: 7390 - DNA, 20 bp, Homo sapiens
ccggacacatcccttcttct

SEQ ID NO: 7391 - DNA, 20 bp, Homo sapiens
cggacacatcccttcttctt

SEQ ID NO: 7392 - DNA, 20 bp, Homo sapiens
ggacacatcccttcttcttt

SEQ ID NO: 7393 - DNA, 20 bp, Homo sapiens
gacacatcccttcttctttg

SEQ ID NO: 7394 - DNA, 20 bp, Homo sapiens
acacatcccttcttctttgg

SEQ ID NO: 7395 - DNA, 20 bp, Homo sapiens
acatcccttcttctttggcc

SEQ ID NO: 7396 - DNA, 20 bp, Homo sapiens
catcccttcttctttggcct

SEQ ID NO: 7397 - DNA, 20 bp, Homo sapiens
atcccttcttctttggcctc

SEQ ID NO: 7398 - DNA, 20 bp, Homo sapiens
tcccttcttctttggcctcg

SEQ ID NO: 7399 - DNA, 20 bp, Homo sapiens
cccttcttctttggcctcga

SEQ ID NO: 7400 - DNA, 20 bp, Homo sapiens
ccttcttctttggcctcgac

SEQ ID NO: 7401 - DNA, 20 bp, Homo sapiens
cttcttctttggcctcgact

SEQ ID NO: 7402 - DNA, 20 bp, Homo sapiens
ttcttctttggcctcgactg

SEQ ID NO: 7403 - DNA, 20 bp, Homo sapiens
tcttctttggcctcgactgg

SEQ ID NO: 7404 - DNA, 20 bp, Homo sapiens
cttctttggcctcgactggg

SEQ ID NO: 7405 - DNA, 20 bp, Homo sapiens
ttctttggcctcgactggga

SEQ ID NO: 7406 - DNA, 20 bp, Homo sapiens
tctttggcctcgactgggat

SEQ ID NO: 7407 - DNA, 20 bp, Homo sapiens
ctttggcctcgactgggatg

SEQ ID NO: 7408 - DNA, 20 bp, Homo sapiens
tttggcctcgactgggatgg

SEQ ID NO: 7409 - DNA, 20 bp, Homo sapiens
ttggcctcgactgggatggt

SEQ ID NO: 7410 - DNA, 20 bp, Homo sapiens
tggcctcgactgggatggtc

SEQ ID NO: 7411 - DNA, 20 bp, Homo sapiens
ggcctcgactgggatggtct

SEQ ID NO: 7412 - DNA, 20 bp, Homo sapiens
gcctcgactgggatggtctc

SEQ ID NO: 7413 - DNA, 20 bp, Homo sapiens
cctcgactgggatggtctcc

SEQ ID NO: 7414 - DNA, 20 bp, Homo sapiens
cctttacaccggatttcgaa

SEQ ID NO: 7415 - DNA, 20 bp, Homo sapiens
ctttacaccggatttcgaag

SEQ ID NO: 7416 - DNA, 20 bp, Homo sapiens
tttacaccggatttcgaagg

SEQ ID NO: 7417 - DNA, 20 bp, Homo sapiens
ttacaccggatttcgaaggt

SEQ ID NO: 7418 - DNA, 20 bp, Homo sapiens
tacaccggatttcgaaggtg

SEQ ID NO: 7419 - DNA, 20 bp, Homo sapiens
acaccggatttcgaaggtgc

SEQ ID NO: 7420 - DNA, 20 bp, Homo sapiens
caccggatttcgaaggtgcc

SEQ ID NO: 7421 - DNA, 20 bp, Homo sapiens
accggatttcgaaggtgcca

SEQ ID NO: 7422 - DNA, 20 bp, Homo sapiens
ccggatttcgaaggtgccac

SEQ ID NO: 7423 - DNA, 20 bp, Homo sapiens
cggatttcgaaggtgccacc

SEQ ID NO: 7424 - DNA, 20 bp, Homo sapiens
ggatttcgaaggtgccaccg

SEQ ID NO: 7425 - DNA, 20 bp, Homo sapiens
gatttcgaaggtgccaccga

SEQ ID NO: 7426 - DNA, 20 bp, Homo sapiens
atttcgaaggtgccaccgac

SEQ ID NO: 7427 - DNA, 20 bp, Homo sapiens
tttcgaaggtgccaccgaca

SEQ ID NO: 7428 - DNA, 20 bp, Homo sapiens
ttcgaaggtgccaccgacac

SEQ ID NO: 7429 - DNA, 20 bp, Homo sapiens
tcgaaggtgccaccgacaca

SEQ ID NO: 7430 - DNA, 20 bp, Homo sapiens
cgaaggtgccaccgacacat

SEQ ID NO: 7431 - DNA, 20 bp, Homo sapiens
gaaggtgccaccgacacatg

SEQ ID NO: 7432 - DNA, 20 bp, Homo sapiens
aaggtgccaccgacacatgc

SEQ ID NO: 7433 - DNA, 20 bp, Homo sapiens
aggtgccaccgacacatgca

SEQ ID NO: 7434 - DNA, 20 bp, Homo sapiens
ggtgccaccgacacatgcaa

SEQ ID NO: 7435 - DNA, 20 bp, Homo sapiens
gtgccaccgacacatgcaac

SEQ ID NO: 7436 - DNA, 20 bp, Homo sapiens
tgccaccgacacatgcaact

SEQ ID NO: 7437 - DNA, 20 bp, Homo sapiens
gccaccgacacatgcaactt

SEQ ID NO: 7438 - DNA, 20 bp, Homo sapiens
ccaccgacacatgcaacttc

SEQ ID NO: 7439 - DNA, 20 bp, Homo sapiens
caccgacacatgcaacttcg

SEQ ID NO: 7440 - DNA, 20 bp, Homo sapiens
ccgacacatgcaacttcgac

SEQ ID NO: 7441 - DNA, 20 bp, Homo sapiens
cgacacatgcaacttcgact

SEQ ID NO: 7442 - DNA, 20 bp, Homo sapiens
gacacatgcaacttcgactt

SEQ ID NO: 7443 - DNA, 20 bp, Homo sapiens
acacatgcaacttcgacttg

SEQ ID NO: 7444 - DNA, 20 bp, Homo sapiens
cacatgcaacttcgacttgg

SEQ ID NO: 7445 - DNA, 20 bp, Homo sapiens
acatgcaacttcgacttggt

SEQ ID NO: 7446 - DNA, 20 bp, Homo sapiens
catgcaacttcgacttggtg

SEQ ID NO: 7447 - DNA, 20 bp, Homo sapiens
atgcaacttcgacttggtgg

SEQ ID NO: 7448 - DNA, 20 bp, Homo sapiens
tgcaacttcgacttggtgga

SEQ ID NO: 7449 - DNA, 20 bp, Homo sapiens
gcaacttcgacttggtggag

SEQ ID NO: 7450 - DNA, 20 bp, Homo sapiens
caacttcgacttggtggagg

SEQ ID NO: 7451 - DNA, 20 bp, Homo sapiens
aacttcgacttggtggagga

SEQ ID NO: 7452 - DNA, 20 bp, Homo sapiens
acttcgacttggtggaggac

SEQ ID NO: 7453 - DNA, 20 bp, Homo sapiens
cttcgacttggtggaggacg

SEQ ID NO: 7454 - DNA, 20 bp, Homo sapiens
ttcgacttggtggaggacgg

SEQ ID NO: 7455 - DNA, 20 bp, Homo sapiens
tcgacttggtggaggacggg

SEQ ID NO: 7456 - DNA, 20 bp, Homo sapiens
cgacttggtggaggacgggc

SEQ ID NO: 7457 - DNA, 20 bp, Homo sapiens
gacttggtggaggacgggct

SEQ ID NO: 7458 - DNA, 20 bp, Homo sapiens
acttggtggaggacgggctc

SEQ ID NO: 7459 - DNA, 20 bp, Homo sapiens
cttggtggaggacgggctca

SEQ ID NO: 7460 - DNA, 20 bp, Homo sapiens
cgaggcagaggctcggaacc

SEQ ID NO: 7461 - DNA, 20 bp, Homo sapiens
gaggcagaggctcggaaccg

SEQ ID NO: 7462 - DNA, 20 bp, Homo sapiens
aggcagaggctcggaaccgg

SEQ ID NO: 7463 - DNA, 20 bp, Homo sapiens
ggcagaggctcggaaccggg

SEQ ID NO: 7464 - DNA, 20 bp, Homo sapiens
gcagaggctcggaaccggga

SEQ ID NO: 7465 - DNA, 20 bp, Homo sapiens
cagaggctcggaaccgggac

SEQ ID NO: 7466 - DNA, 20 bp, Homo sapiens
gaggctcggaaccgggacct

SEQ ID NO: 7467 - DNA, 20 bp, Homo sapiens
aggctcggaaccgggaccta

SEQ ID NO: 7468 - DNA, 20 bp, Homo sapiens
ggctcggaaccgggacctag

SEQ ID NO: 7469 - DNA, 20 bp, Homo sapiens
gctcggaaccgggacctaga

SEQ ID NO: 7470 - DNA, 20 bp, Homo sapiens
ctcggaaccgggacctagag

SEQ ID NO: 7471 - DNA, 20 bp, Homo sapiens
tcggaaccgggacctagagg

SEQ ID NO: 7472 - DNA, 20 bp, Homo sapiens
cggaaccgggacctagaggc

SEQ ID NO: 7473 - DNA, 20 bp, Homo sapiens
ggcagttgcaggagcggatg

SEQ ID NO: 7474 - DNA, 20 bp, Homo sapiens
gcagttgcaggagcggatgg

SEQ ID NO: 7475 - DNA, 20 bp, Homo sapiens
cagttgcaggagcggatgga

SEQ ID NO: 7476 - DNA, 20 bp, Homo sapiens
agttgcaggagcggatggag

SEQ ID NO: 7477 - DNA, 20 bp, Homo sapiens
gttgcaggagcggatggagt

SEQ ID NO: 7478 - DNA, 20 bp, Homo sapiens
ttgcaggagcggatggagtt

SEQ ID NO: 7479 - DNA, 20 bp, Homo sapiens
tgcaggagcggatggagttg

SEQ ID NO: 7480 - DNA, 20 bp, Homo sapiens
caggagcggatggagttgct

SEQ ID NO: 7481 - DNA, 20 bp, Homo sapiens
aggagcggatggagttgctg

SEQ ID NO: 7482 - DNA, 20 bp, Homo sapiens
ggagcggatggagttgctgc

SEQ ID NO: 7483 - DNA, 20 bp, Homo sapiens
ggcagagggagccacagctg

SEQ ID NO: 7484 - DNA, 20 bp, Homo sapiens
gcagagggagccacagctgt

SEQ ID NO: 7485 - DNA, 20 bp, Homo sapiens
cagagggagccacagctgtc

SEQ ID NO: 7486 - DNA, 20 bp, Homo sapiens
agagggagccacagctgtca

SEQ ID NO: 7487 - DNA, 20 bp, Homo sapiens
gagggagccacagctgtcac

SEQ ID NO: 7488 - DNA, 20 bp, Homo sapiens
agggagccacagctgtcacg

SEQ ID NO: 7489 - DNA, 20 bp, Homo sapiens
gggagccacagctgtcacgg

SEQ ID NO: 7490 - DNA, 20 bp, Homo sapiens
ggagccacagctgtcacggg

SEQ ID NO: 7491 - DNA, 20 bp, Homo sapiens
gagccacagctgtcacgggg

SEQ ID NO: 7492 - DNA, 20 bp, Homo sapiens
agccacagctgtcacggggg

SEQ ID NO: 7493 - DNA, 20 bp, Homo sapiens
gccacagctgtcacgggggt

SEQ ID NO: 7494 - DNA, 20 bp, Homo sapiens
ccacagctgtcacgggggtc

SEQ ID NO: 7495 - DNA, 20 bp, Homo sapiens
cacagctgtcacgggggtcc

SEQ ID NO: 7496 - DNA, 20 bp, Homo sapiens
acagctgtcacgggggtccc

SEQ ID NO: 7497 - DNA, 20 bp, Homo sapiens
cgggccacggatccaccttc

SEQ ID NO: 7498 - DNA, 20 bp, Homo sapiens
gggccacggatccaccttcc

SEQ ID NO: 7499 - DNA, 20 bp, Homo sapiens
ggccacggatccaccttccc

SEQ ID NO: 7500 - DNA, 20 bp, Homo sapiens
gccacggatccaccttccca

SEQ ID NO: 7501 - DNA, 20 bp, Homo sapiens
ccacggatccaccttcccat

SEQ ID NO: 7502 - DNA, 20 bp, Homo sapiens
cacggatccaccttcccatc

SEQ ID NO: 7503 - DNA, 20 bp, Homo sapiens
cggatccaccttcccatcta

SEQ ID NO: 7504 - DNA, 20 bp, Homo sapiens
ggatccaccttcccatctag

SEQ ID NO: 7505 - DNA, 20 bp, Homo sapiens
gatccaccttcccatctaga

SEQ ID NO: 7506 - DNA, 20 bp, Homo sapiens
atccaccttcccatctagat

SEQ ID NO: 7507 - DNA, 20 bp, Homo sapiens
ccaccttcccatctagatgg

SEQ ID NO: 7508 - DNA, 20 bp, Homo sapiens
caccttcccatctagatggc

SEQ ID NO: 7509 - DNA, 20 bp, Homo sapiens
accttcccatctagatggcc

SEQ ID NO: 7510 - DNA, 20 bp, Homo sapiens
tgggccagtgcccgctggtg

SEQ ID NO: 7511 - DNA, 20 bp, Homo sapiens
gggccagtgcccgctggtgg

SEQ ID NO: 7512 - DNA, 20 bp, Homo sapiens
ggccagtgcccgctggtggg

SEQ ID NO: 7513 - DNA, 20 bp, Homo sapiens
gccagtgcccgctggtgggg

SEQ ID NO: 7514 - DNA, 20 bp, Homo sapiens
cagtgcccgctggtggggcc

SEQ ID NO: 7515 - DNA, 20 bp, Homo sapiens
agtgcccgctggtggggcca

SEQ ID NO: 7516 - DNA, 20 bp, Homo sapiens
gtgcccgctggtggggccag

SEQ ID NO: 7517 - DNA, 20 bp, Homo sapiens
tgcccgctggtggggccagg

SEQ ID NO: 7518 - DNA, 20 bp, Homo sapiens
gcccgctggtggggccaggc

SEQ ID NO: 7519 - DNA, 20 bp, Homo sapiens
ccgctggtggggccaggccc

SEQ ID NO: 7520 - DNA, 20 bp, Homo sapiens
cccatgcaccgccgccacct

SEQ ID NO: 7521 - DNA, 20 bp, Homo sapiens
ccatgcaccgccgccacctg

SEQ ID NO: 7522 - DNA, 20 bp, Homo sapiens
catgcaccgccgccacctgc

SEQ ID NO: 7523 - DNA, 20 bp, Homo sapiens
atgcaccgccgccacctgct

SEQ ID NO: 7524 - DNA, 20 bp, Homo sapiens
tgcaccgccgccacctgctg

SEQ ID NO: 7525 - DNA, 20 bp, Homo sapiens
gcaccgccgccacctgctgc

SEQ ID NO: 7526 - DNA, 20 bp, Homo sapiens
caccgccgccacctgctgct

SEQ ID NO: 7527 - DNA, 20 bp, Homo sapiens
accgccgccacctgctgctc

SEQ ID NO: 7528 - DNA, 20 bp, Homo sapiens
ccgccgccacctgctgctcc

SEQ ID NO: 7529 - DNA, 20 bp, Homo sapiens
cgccgccacctgctgctccc

SEQ ID NO: 7530 - DNA, 20 bp, Homo sapiens
gccgccacctgctgctccct

SEQ ID NO: 7531 - DNA, 20 bp, Homo sapiens
ccgccacctgctgctccctg

SEQ ID NO: 7532 - DNA, 20 bp, Homo sapiens
cgccacctgctgctccctgc

SEQ ID NO: 7533 - DNA, 20 bp, Homo sapiens
gccacctgctgctccctgcc

SEQ ID NO: 7534 - DNA, 20 bp, Homo sapiens
ccacctgctgctccctgcca

SEQ ID NO: 7535 - DNA, 20 bp, Homo sapiens
cacctgctgctccctgccag

SEQ ID NO: 7536 - DNA, 20 bp, Homo sapiens
cctgctgctccctgccaggg

SEQ ID NO: 7537 - DNA, 20 bp, Homo sapiens
ctgctgctccctgccagggt

SEQ ID NO: 7538 - DNA, 20 bp, Homo sapiens
tgctgctccctgccagggtc

SEQ ID NO: 7539 - DNA, 20 bp, Homo sapiens
gctgctccctgccagggtcc

SEQ ID NO: 7540 - DNA, 20 bp, Homo sapiens
cctgccagggtccctaggcc

SEQ ID NO: 7541 - DNA, 20 bp, Homo sapiens
ctgccagggtccctaggcct

SEQ ID NO: 7542 - DNA, 20 bp, Homo sapiens
gccagggtccctaggcctgg

SEQ ID NO: 7543 - DNA, 20 bp, Homo sapiens
ccagggtccctaggcctggc

SEQ ID NO: 7544 - DNA, 20 bp, Homo sapiens
cagggtccctaggcctggcc

SEQ ID NO: 7545 - DNA, 20 bp, Homo sapiens
agggtccctaggcctggcct

SEQ ID NO: 7546 - DNA, 20 bp, Homo sapiens
gggtccctaggcctggccta

SEQ ID NO: 7547 - DNA, 20 bp, Homo sapiens
ggtccctaggcctggcctat

SEQ ID NO: 7548 - DNA, 20 bp, Homo sapiens
gtccctaggcctggcctatc

SEQ ID NO: 7549 - DNA, 20 bp, Homo sapiens
tccctaggcctggcctatcg

SEQ ID NO: 7550 - DNA, 20 bp, Homo sapiens
ccctaggcctggcctatcgg

SEQ ID NO: 7551 - DNA, 20 bp, Homo sapiens
cctaggcctggcctatcgga

SEQ ID NO: 7552 - DNA, 20 bp, Homo sapiens
ctaggcctggcctatcggag

SEQ ID NO: 7553 - DNA, 20 bp, Homo sapiens
taggcctggcctatcggagg

SEQ ID NO: 7554 - DNA, 20 bp, Homo sapiens
aggcctggcctatcggaggc

SEQ ID NO: 7555 - DNA, 20 bp, Homo sapiens
gcctggcctatcggaggcgc

SEQ ID NO: 7556 - DNA, 20 bp, Homo sapiens
gcgctttccctgctcctgtt

SEQ ID NO: 7557 - DNA, 20 bp, Homo sapiens
cgctttccctgctcctgttc

SEQ ID NO: 7558 - DNA, 20 bp, Homo sapiens
gctttccctgctcctgttcg

SEQ ID NO: 7559 - DNA, 20 bp, Homo sapiens
ctttccctgctcctgttcgc

SEQ ID NO: 7560 - DNA, 20 bp, Homo sapiens
tttccctgctcctgttcgcc

SEQ ID NO: 7561 - DNA, 20 bp, Homo sapiens
ttccctgctcctgttcgccg

SEQ ID NO: 7562 - DNA, 20 bp, Homo sapiens
tccctgctcctgttcgccgt

SEQ ID NO: 7563 - DNA, 20 bp, Homo sapiens
ccctgctcctgttcgccgtt

SEQ ID NO: 7564 - DNA, 20 bp, Homo sapiens
cctgctcctgttcgccgttg

SEQ ID NO: 7565 - DNA, 20 bp, Homo sapiens
tctgtctcgtgccgccgccc

SEQ ID NO: 7566 - DNA, 20 bp, Homo sapiens
ctgtctcgtgccgccgccct

SEQ ID NO: 7567 - DNA, 20 bp, Homo sapiens
tgtctcgtgccgccgccctg

SEQ ID NO: 7568 - DNA, 20 bp, Homo sapiens
gtctcgtgccgccgccctgg

SEQ ID NO: 7569 - DNA, 20 bp, Homo sapiens
tctcgtgccgccgccctggg

SEQ ID NO: 7570 - DNA, 20 bp, Homo sapiens
ctcgtgccgccgccctgggc

SEQ ID NO: 7571 - DNA, 20 bp, Homo sapiens
tcgtgccgccgccctgggct

SEQ ID NO: 7572 - DNA, 20 bp, Homo sapiens
cgtgccgccgccctgggctg

SEQ ID NO: 7573 - DNA, 20 bp, Homo sapiens
gtgccgccgccctgggctgc

SEQ ID NO: 7574 - DNA, 20 bp, Homo sapiens
cgccggccaactcaccgcag

SEQ ID NO: 7575 - DNA, 20 bp, Homo sapiens
gccggccaactcaccgcagt

SEQ ID NO: 7576 - DNA, 20 bp, Homo sapiens
ccggccaactcaccgcagtc

SEQ ID NO: 7577 - DNA, 20 bp, Homo sapiens
cggccaactcaccgcagtct

SEQ ID NO: 7578 - DNA, 20 bp, Homo sapiens
ggccaactcaccgcagtctg

SEQ ID NO: 7579 - DNA, 20 bp, Homo sapiens
gccaactcaccgcagtctgg

SEQ ID NO: 7580 - DNA, 20 bp, Homo sapiens
ccaactcaccgcagtctggc

SEQ ID NO: 7581 - DNA, 20 bp, Homo sapiens
caactcaccgcagtctggcg

SEQ ID NO: 7582 - DNA, 20 bp, Homo sapiens
ctgaaccctagaactgtctt

SEQ ID NO: 7583 - DNA, 20 bp, Homo sapiens
tgaaccctagaactgtcttc

SEQ ID NO: 7584 - DNA, 20 bp, Homo sapiens
gaaccctagaactgtcttcg

SEQ ID NO: 7585 - DNA, 20 bp, Homo sapiens
aaccctagaactgtcttcga

SEQ ID NO: 7586 - DNA, 20 bp, Homo sapiens
accctagaactgtcttcgac

SEQ ID NO: 7587 - DNA, 20 bp, Homo sapiens
ccctagaactgtcttcgact

SEQ ID NO: 7588 - DNA, 20 bp, Homo sapiens
cctagaactgtcttcgactc

SEQ ID NO: 7589 - DNA, 20 bp, Homo sapiens
ctagaactgtcttcgactcc

SEQ ID NO: 7590 - DNA, 20 bp, Homo sapiens
tagaactgtcttcgactccg

SEQ ID NO: 7591 - DNA, 20 bp, Homo sapiens
agaactgtcttcgactccgg

SEQ ID NO: 7592 - DNA, 20 bp, Homo sapiens
gaactgtcttcgactccggg

SEQ ID NO: 7593 - DNA, 20 bp, Homo sapiens
aactgtcttcgactccgggg

SEQ ID NO: 7594 - DNA, 20 bp, Homo sapiens
actgtcttcgactccggggc

SEQ ID NO: 7595 - DNA, 20 bp, Homo sapiens
ctgtcttcgactccggggcc

SEQ ID NO: 7596 - DNA, 20 bp, Homo sapiens
tgtcttcgactccggggccc

SEQ ID NO: 7597 - DNA, 20 bp, Homo sapiens
agaagccgcgcccaccgcct

SEQ ID NO: 7598 - DNA, 20 bp, Homo sapiens
gaagccgcgcccaccgcctg

SEQ ID NO: 7599 - DNA, 20 bp, Homo sapiens
aagccgcgcccaccgcctgc

SEQ ID NO: 7600 - DNA, 20 bp, Homo sapiens
gccgcgcccaccgcctgcca

SEQ ID NO: 7601 - DNA, 20 bp, Homo sapiens
cgcgcccaccgcctgccagt

SEQ ID NO: 7602 - DNA, 20 bp, Homo sapiens
cgcccaccgcctgccagttc

SEQ ID NO: 7603 - DNA, 20 bp, Homo sapiens
gcccaccgcctgccagttca

SEQ ID NO: 7604 - DNA, 20 bp, Homo sapiens
ccaccgcctgccagttcaca

SEQ ID NO: 7605 - DNA, 20 bp, Homo sapiens
tgggtctccgcccagctcca

SEQ ID NO: 7606 - DNA, 20 bp, Homo sapiens
ggtctccgcccagctccagt

SEQ ID NO: 7607 - DNA, 20 bp, Homo sapiens
gtctccgcccagctccagtc

SEQ ID NO: 7608 - DNA, 20 bp, Homo sapiens
ctccgcccagctccagtcct

SEQ ID NO: 7609 - DNA, 20 bp, Homo sapiens
ccgcccagctccagtcctgt

SEQ ID NO: 7610 - DNA, 20 bp, Homo sapiens
cgcccagctccagtcctgtg

SEQ ID NO: 7611 - DNA, 20 bp, Homo sapiens
gcccagctccagtcctgtga

SEQ ID NO: 7612 - DNA, 20 bp, Homo sapiens
tctttcggccaggctgaggc

SEQ ID NO: 7613 - DNA, 20 bp, Homo sapiens
ctttcggccaggctgaggcc

SEQ ID NO: 7614 - DNA, 20 bp, Homo sapiens
ccgacttcttgcagtggggt

SEQ ID NO: 7615 - DNA, 20 bp, Homo sapiens
agatcctcccatcctggggc

SEQ ID NO: 7616 - DNA, 20 bp, Homo sapiens
caacatttctctgtcctatg

SEQ ID NO: 7617 - DNA, 20 bp, Homo sapiens
ggggcagagtaaggtcagca

SEQ ID NO: 7618 - DNA, 20 bp, Homo sapiens
tgactcagagccatggctta

SEQ ID NO: 7619 - DNA, 20 bp, Homo sapiens
cagcctcccatggcctctct

SEQ ID NO: 7620 - DNA, 20 bp, Homo sapiens
gggcaagccaggagggccag

SEQ ID NO: 7621 - DNA, 20 bp, Homo sapiens
agggccagcatggggcagct

SEQ ID NO: 7622 - DNA, 20 bp, Homo sapiens
atggggcagctgccaggggc

SEQ ID NO: 7623 - DNA, 20 bp, Homo sapiens
gccaggggcgcagccgacag

SEQ ID NO: 7624 - DNA, 20 bp, Homo sapiens
cgacaggcaggtgttcggcg

SEQ ID NO: 7625 - DNA, 20 bp, Homo sapiens
ggtgcccaggcactgggagg

SEQ ID NO: 7626 - DNA, 20 bp, Homo sapiens
ccagctttgcagacaggcgc

SEQ ID NO: 7627 - DNA, 20 bp, Homo sapiens
ccaggagggacaactttggg

SEQ ID NO: 7628 - DNA, 20 bp, Homo sapiens
ctttgggttcttctgggtgt

SEQ ID NO: 7629 - DNA, 20 bp, Homo sapiens
ctatgagccgtgtgggtcag

SEQ ID NO: 7630 - DNA, 20 bp, Homo sapiens
ctttccagggcctggggcca

SEQ ID NO: 7631 - DNA, 20 bp, Homo sapiens
cttctgccagctgccttgtc

SEQ ID NO: 7632 - DNA, 20 bp, Homo sapiens
tcactggtcactggtttctt

SEQ ID NO: 7633 - DNA, 20 bp, Homo sapiens
ctcctcctcccatttcacag

SEQ ID NO: 7634 - DNA, 20 bp, Homo sapiens
cagcctctggaaaaaccttc

SEQ ID NO: 7635 - DNA, 20 bp, Homo sapiens
ccctaatgactctcctggcc

SEQ ID NO: 7636 - DNA, 20 bp, Homo sapiens
gaggagcactccttttgtgg

SEQ ID NO: 7637 - DNA, 20 bp, Homo sapiens
gttcctgctgccttaaaagg

SEQ ID NO: 7638 - DNA, 20 bp, Homo sapiens
tgggaagcagacagtcctag

SEQ ID NO: 7639 - DNA, 20 bp, Homo sapiens
cttagaaattgatgaatgac

SEQ ID NO: 7640 - DNA, 20 bp, Homo sapiens
tctccggctgcagctcctcc

SEQ ID NO: 7641 - DNA, 20 bp, Homo sapiens
gctgcagctcctccgggtgc

SEQ ID NO: 7642 - DNA, 20 bp, Homo sapiens
gtgccctgcaggtgtcgtgc

SEQ ID NO: 7643 - DNA, 20 bp, Homo sapiens
tgagaactacctggtgagct

SEQ ID NO: 7644 - DNA, 20 bp, Homo sapiens
aggaggtggggagaggaagc

SEQ ID NO: 7645 - DNA, 20 bp, Homo sapiens
tctaggattgggggtgctgc

SEQ ID NO: 7646 - DNA, 20 bp, Homo sapiens
gtgtcaggtggatgaggggc

SEQ ID NO: 7647 - DNA, 20 bp, Homo sapiens
ggggggtctcttacctggaa

SEQ ID NO: 7648 - DNA, 20 bp, Homo sapiens
gagtgtctgggacctattct

SEQ ID NO: 7649 - DNA, 20 bp, Homo sapiens
ccagaacatctcagggggag

SEQ ID NO: 7650 - DNA, 20 bp, Homo sapiens
tggttatctctgggctgggg

SEQ ID NO: 7651 - DNA, 20 bp, Homo sapiens
gccatccgtgatggatcagg

SEQ ID NO: 7652 - DNA, 20 bp, Homo sapiens
cagtacctggtcatggagta

SEQ ID NO: 7653 - DNA, 20 bp, Homo sapiens
ggttcttggaaggtcagagc

SEQ ID NO: 7654 - DNA, 20 bp, Homo sapiens
ggtgggaccacagaagggag

SEQ ID NO: 7655 - DNA, 20 bp, Homo sapiens
gcagggacatcaaacccgac

SEQ ID NO: 7656 - DNA, 20 bp, Homo sapiens
gaacggtgagccagtgccct

SEQ ID NO: 7657 - DNA, 20 bp, Homo sapiens
agtggttggaaggagggccc

SEQ ID NO: 7658 - DNA, 20 bp, Homo sapiens
gtgggcccagaggggtgggc

SEQ ID NO: 7659 - DNA, 20 bp, Homo sapiens
ccaagcctcgctctgctcct

SEQ ID NO: 7660 - DNA, 20 bp, Homo sapiens
agatcgtccactacaaggtg

SEQ ID NO: 7661 - DNA, 20 bp, Homo sapiens
ggtgagcgggggcggggtag

SEQ ID NO: 7662 - DNA, 20 bp, Homo sapiens
aggacccagcagtgacctag

SEQ ID NO: 7663 - DNA, 20 bp, Homo sapiens
ggagtggggagctatctgag

SEQ ID NO: 7664 - DNA, 20 bp, Homo sapiens
gtctagagaattagagaatt

SEQ ID NO: 7665 - DNA, 20 bp, Homo sapiens
tcctgcatggccctcaggta

SEQ ID NO: 7666 - DNA, 20 bp, Homo sapiens
tgcaggatcagtcttggaac

SEQ ID NO: 7667 - DNA, 20 bp, Homo sapiens
cgccgcgccaccgccctcct

SEQ ID NO: 7668 - DNA, 20 bp, Homo sapiens
tcttctccttccagctgtca

SEQ ID NO: 7669 - DNA, 20 bp, Homo sapiens
cacggatccaccttcccatg

SEQ ID NO: 7670 - DNA, 20 bp, Homo sapiens
gatctccctagataacctcc

SEQ ID NO: 7671 - DNA, 20 bp, Homo sapiens
atcgggtcacctgtcccttc

SEQ ID NO: 7672 - DNA, 20 bp, Homo sapiens
ctgctccctgccagggtacg

SEQ ID NO: 7673 - DNA, 20 bp, Homo sapiens
ggcgtaggcggggcgagtcc

SEQ ID NO: 7674 - DNA, 20 bp, Homo sapiens
ggcggggcgagtcccaggag

SEQ ID NO: 7675 - DNA, 20 bp, Homo sapiens
gcggggcgagtcccaggagc

SEQ ID NO: 7676 - DNA, 20 bp, Homo sapiens
ggcgagtcccaggagccaat

SEQ ID NO: 7677 - DNA, 20 bp, Homo sapiens
gcgagtcccaggagccaatc

SEQ ID NO: 7678 - DNA, 20 bp, Homo sapiens
cccaggagccaatcagaggc

SEQ ID NO: 7679 - DNA, 20 bp, Homo sapiens
agccaatcagaggcccatgc

SEQ ID NO: 7680 - DNA, 20 bp, Homo sapiens
tcagaggcccatgccgggtg

SEQ ID NO: 7681 - DNA, 20 bp, Homo sapiens
cgcaggtccctaggcctggc

SEQ ID NO: 7682 - DNA, 20 bp, Homo sapiens
gagacggaggcgtgcagaag

SEQ ID NO: 7683 - DNA, 20 bp, Homo sapiens
ccggccgtggctgtgggcca

SEQ ID NO: 7684 - DNA, 20 bp, Homo sapiens
cccgctggtggggccaggcc

SEQ ID NO: 7685 - DNA, 20 bp, Homo sapiens
acctgctgctccctgccagg

SEQ ID NO: 7686 - DNA, 20 bp, Homo sapiens
agattgtcatggccatagac

SEQ ID NO: 7687 - DNA, 20 bp, Homo sapiens
gctggtggctgtgggcaccc

SEQ ID NO: 7688 - DNA, 20 bp, Homo sapiens
cactgccatggtgagcgggg

SEQ ID NO: 7689 - DNA, 20 bp, Homo sapiens
cgacattcctcggtatttat

SEQ ID NO: 7690 - DNA, 20 bp, Homo sapiens
cggtatttattgtctgtccc

SEQ ID NO: 7691 - DNA, 20 bp, Homo sapiens
tgggctccgatcgggtcacc

SEQ ID NO: 7692 - DNA, 20 bp, Homo sapiens
tgtcccttctctctccagct

SEQ ID NO: 7693 - DNA, 20 bp, Homo sapiens
tctctccagctagatggccc

SEQ ID NO: 7694 - DNA, 20 bp, Homo sapiens
gccgacttcttgcagtgggg

SEQ ID NO: 7695 - DNA, 20 bp, Homo sapiens
gctgccttaaaagggctcaa

SEQ ID NO: 7696 - DNA, 20 bp, Homo sapiens
acggatccaccttcccatgt

SEQ ID NO: 7697 - DNA, 20 bp, Homo sapiens
aggcgaggtgtcgtgcttcc

SEQ ID NO: 7698 - DNA, 20 bp, Homo sapiens
atccaccttcccatatggcc

SEQ ID NO: 7699 - DNA, 16 bp, Homo sapiens
agccacacgtgcaagc

SEQ ID NO: 7700 - DNA, 14 bp, Homo sapiens
gccacacgtgcaag

SEQ ID NO: 7701 - DNA, 16 bp, Homo sapiens
ctgccagttcacaacc

SEQ ID NO: 7702 - DNA, 16 bp, Homo sapiens
cagttcacaaccgctc

SEQ ID NO: 7703 - DNA, 14 bp, Homo sapiens
agttcacaaccgct

SEQ ID NO: 7704 - DNA, 16 bp, Homo sapiens
ggcctgggaaggcagc

SEQ ID NO: 7705 - DNA, 16 bp, Homo sapiens
ttggttcgcaaagtgc

SEQ ID NO: 7706 - DNA, 14 bp, Homo sapiens
tggttcgcaaagtg

SEQ ID NO: 7707 - DNA, 16 bp, Homo sapiens
aaagtgcaaagctttc

SEQ ID NO: 7708 - DNA, 16 bp, Homo sapiens
ttgacctcgtcctccg

SEQ ID NO: 7709 - DNA, 16 bp, Homo sapiens
gactcgctgacaggct

SEQ ID NO: 7710 - DNA, 14 bp, Homo sapiens
actcgctgacaggc

SEQ ID NO: 7711 - DNA, 16 bp, Homo sapiens
ctgacaggctacagga

SEQ ID NO: 7712 - DNA, 16 bp, Homo sapiens
agtgaagcctcgcttc

SEQ ID NO: 7713 - DNA, 16 bp, Homo sapiens
tgccagacgggcaggt

SEQ ID NO: 7714 - DNA, 14 bp, Homo sapiens
gccagacgggcagg

SEQ ID NO: 7715 - DNA, 16 bp, Homo sapiens
cctgggatcgctgacc

SEQ ID NO: 7716 - DNA, 14 bp, Homo sapiens
ctgggatcgctgac

SEQ ID NO: 7717 - DNA, 16 bp, Homo sapiens
agcattaaagtcattc

SEQ ID NO: 7718 - DNA, 24 bp, Homo sapiens
ttttgatctagcacagacccttca

SEQ ID NO: 7719 - DNA, 20 bp, Homo sapiens
tgtctagaatcctaaaggca

SEQ ID NO: 7720 - DNA, 20 bp, Homo sapiens
ggggcaaatattggcaatta

SEQ ID NO: 7721 - DNA, 20 bp, Homo sapiens
caagttggcaagtaactccc

SEQ ID NO: 7722 - DNA, 20 bp, Homo sapiens
tttccattgtttaactgcaa

SEQ ID NO: 7723 - DNA, 20 bp, Homo sapiens
ctgagtcataaccagcctgg

SEQ ID NO: 7724 - DNA, 20 bp, Homo sapiens
gctccttggtgaattgataa

SEQ ID NO: 7725 - DNA, 20 bp, Homo sapiens
attatatgtcatacctccat

SEQ ID NO: 7726 - DNA, 20 bp, Homo sapiens
gaacattatctgcatatgcc

SEQ ID NO: 7727 - DNA, 20 bp, Homo sapiens
gctgtgctgtgtgccaatgt

SEQ ID NO: 7728 - DNA, 20 bp, Homo sapiens
tgccaatgtttcgtttgcct

SEQ ID NO: 7729 - DNA, 20 bp, Homo sapiens
tctgcagtattgcatgttag

SEQ ID NO: 7730 - DNA, 20 bp, Homo sapiens
ggacttgttcctgtgggctt

SEQ ID NO: 7731 - DNA, 20 bp, Homo sapiens
aatgttttacactattgacc

SEQ ID NO: 7732 - DNA, 20 bp, Homo sapiens
ggcatttcatccttcatgaa

SEQ ID NO: 7733 - DNA, 20 bp, Homo sapiens
gctgctattagaatgcattg

SEQ ID NO: 7734 - DNA, 20 bp, Homo sapiens
aactggcaagtggaaatgtt

SEQ ID NO: 7735 - DNA, 20 bp, Homo sapiens
aaatgtggggattgggaacc

SEQ ID NO: 7736 - DNA, 20 bp, Homo sapiens
gcctcacctgatttttatta

SEQ ID NO: 7737 - DNA, 20 bp, Homo sapiens
aactgtaatgctgggtggga

SEQ ID NO: 7738 - DNA, 25 bp, Homo sapiens
agattaattgggagtggtaggatga

SEQ ID NO: 7739 - DNA, 29 bp, Homo sapiens
ttttctggaacttacttatggtaaccttt

SEQ ID NO: 7740 - DNA, 20 bp, Homo sapiens
ttggccaagctagcatctta

SEQ ID NO: 7741 - DNA, 20 bp, Homo sapiens
gcgccaagtgaagcctcgct

SEQ ID NO: 7742 - DNA, 20 bp, Homo sapiens
caagtgaagcctcgcttccc

SEQ ID NO: 7743 - DNA, 20 bp, Homo sapiens
accctgggatcgctgaccgc

SEQ ID NO: 7744 - DNA, 20 bp, Homo sapiens
agatcaccgcgctggcaccc

SEQ ID NO: 7745 - DNA, 20 bp, Homo sapiens
cagtcactttctttgtaaca

SEQ ID NO: 7746 - DNA, 20 bp, Homo sapiens
aacttccgttgctgccatcg

SEQ ID NO: 7747 - DNA, 20 bp, Homo sapiens
tgctgccatcgtaaactgac

SEQ ID NO: 7748 - DNA, 20 bp, Homo sapiens
tttttcgaaacaaagccctg

SEQ ID NO: 7749 - DNA, 20 bp, Homo sapiens
agccctgtggaagaaaatgg

SEQ ID NO: 7750 - DNA, 20 bp, Homo sapiens
tggaaaacttgaagaagcat

SEQ ID NO: 7751 - DNA, 20 bp, Homo sapiens
gaagcattaaagtcattctg

SEQ ID NO: 7752 - DNA, 20 bp, Homo sapiens
gaatcttctcaatggggggg

SEQ ID NO: 7753 - DNA, 21 bp, Homo sapiens
aacttcgccagtcaactacgc

SEQ ID NO: 7754 - DNA, 20 bp, Homo sapiens
ttggttcgcaaagtgcaaag

SEQ ID NO: 7755 - DNA, 20 bp, Homo sapiens
cgttggttcgcaaagtgcaa

SEQ ID NO: 7756 - DNA, 20 bp, Homo sapiens
gcaaagtgcaaagctttctt

SEQ ID NO: 7757 - DNA, 20 bp, Homo sapiens
tattgacctcgtcctccgac

SEQ ID NO: 7758 - DNA, 20 bp, Homo sapiens
gccagttcacaaccgctccg

SEQ ID NO: 7759 - DNA, 16 bp, Homo sapiens
ccaggaggcccttagg

SEQ ID NO: 7760 - DNA, 20 bp, Homo sapiens
catttactgccgtgtgtggc

SEQ ID NO: 7761 - DNA, 16 bp, Homo sapiens
cgccgaccggtgtcca

SEQ ID NO: 7762 - DNA, 16 bp, Homo sapiens
gtacatgaaattaaga

SEQ ID NO: 7763 - DNA, 16 bp, Homo sapiens
ccctttgtagtcaacc

SEQ ID NO: 7764 - DNA, 20 bp, Homo sapiens
ttttggacactggtggctca

SEQ ID NO: 7765 - DNA, 16 bp, Homo sapiens
ggcagaacaatatgaa

SEQ ID NO: 7766 - DNA, 16 bp, Homo sapiens
tgttagccttaaagca

SEQ ID NO: 7767 - DNA, 16 bp, Homo sapiens
ccggctgcccttggac

SEQ ID NO: 7768 - DNA, 12 bp, Homo sapiens
aatgtcattaac

SEQ ID NO: 7769 - DNA, 16 bp, Homo sapiens
taccataatacctaat

SEQ ID NO: 7770 - DNA, 18 bp, Homo sapiens
cggaccatcatcacctac

SEQ ID NO: 7771 - DNA, 20 bp, Homo sapiens
gagttcgcatcttgataagg

SEQ ID NO: 7772 - DNA, 16 bp, Homo sapiens
gcctagatcattttgc

SEQ ID NO: 7773 - DNA, 16 bp, Homo sapiens
caaacatacccaggca

SEQ ID NO: 7774 - DNA, 18 bp, Homo sapiens
acctggagaacatcatct

SEQ ID NO: 7775 - DNA, 16 bp, Homo sapiens
gccaggtcgttgaggg

SEQ ID NO: 7776 - DNA, 22 bp, Homo sapiens
caagaacaccttcagaaccgga

SEQ ID NO: 7777 - DNA, 16 bp, Homo sapiens
taccctccttttctga

SEQ ID NO: 7778 - DNA, 20 bp, Homo sapiens
gagtttggagataatacagc

SEQ ID NO: 7779 - DNA, 18 bp, Homo sapiens
gaaagacacaaattcctg

SEQ ID NO: 7780 - DNA, 16 bp, Homo sapiens
aaggtggcagcttgca

SEQ ID NO: 7781 - DNA, 12 bp, Homo sapiens
gataatgcctca

SEQ ID NO: 7782 - DNA, 16 bp, Homo sapiens
cgttgttgcattgttg

SEQ ID NO: 7783 - DNA, 14 bp, Homo sapiens
gagatatggctaat

SEQ ID NO: 7784 - DNA, 16 bp, Homo sapiens
atcgaggagtgtgatg

SEQ ID NO: 7785 - DNA, 16 bp, Homo sapiens
tgtcccaaggttgggt

SEQ ID NO: 7786 - DNA, 16 bp, Homo sapiens
gatgtcctcattgccc

SEQ ID NO: 7787 - DNA, 16 bp, Homo sapiens
cctgtgcaggtattga

SEQ ID NO: 7788 - DNA, 18 bp, Homo sapiens
gactgcctcatgtcattt

SEQ ID NO: 7789 - DNA, 16 bp, Homo sapiens
gtcaagctgaaagagc

SEQ ID NO: 7790 - DNA, 16 bp, Homo sapiens
gaaagttccctcacgg

SEQ ID NO: 7791 - DNA, 16 bp, Homo sapiens
cacccggccatcttcc

SEQ ID NO: 7792 - DNA, 16 bp, Homo sapiens
gtctatctgcgttggc

SEQ ID NO: 7793 - DNA, 16 bp, Homo sapiens
gtcgacctggttatcc

SEQ ID NO: 7794 - DNA, 16 bp, Homo sapiens
ttgttcttctatgggg

SEQ ID NO: 7795 - DNA, 16 bp, Homo sapiens
tgacacatccatcctt

SEQ ID NO: 7796 - DNA, 18 bp, Homo sapiens
ccctactgtctttgagaa

SEQ ID NO: 7797 - DNA, 16 bp, Homo sapiens
tcaagctgaaagagcc

SEQ ID NO: 7798 - DNA, 20 bp, Homo sapiens
ttcaaggccagaaagagtta

SEQ ID NO: 7799 - DNA, 12 bp, Homo sapiens
agcaacatcggc

SEQ ID NO: 7800 - DNA, 16 bp, Homo sapiens
acaagctgtaattaag

SEQ ID NO: 7801 - DNA, 16 bp, Homo sapiens
gccaatcgcataaatc

SEQ ID NO: 7802 - DNA, 25 bp, Homo sapiens
gtggctaacagaagctgaacagttt

SEQ ID NO: 7803 - DNA, 12 bp, Homo sapiens
tgaagaaacttg

SEQ ID NO: 7804 - DNA, 16 bp, Homo sapiens
aggggaactacttgag

SEQ ID NO: 7805 - DNA, 16 bp, Homo sapiens
atgtaaaccgtaattt

SEQ ID NO: 7806 - DNA, 16 bp, Homo sapiens
gctggccacggtcata

SEQ ID NO: 7807 - DNA, 16 bp, Homo sapiens
ccctgtacttttgtat

SEQ ID NO: 7808 - DNA, 16 bp, Homo sapiens
ccttctataagtgcgg

SEQ ID NO: 7809 - DNA, 16 bp, Homo sapiens
aaaaagtgtgccgaga

SEQ ID NO: 7810 - DNA, 16 bp, Homo sapiens
tgcgagaggagacaga

SEQ ID NO: 7811 - DNA, 19 bp, Homo sapiens
cggtcccgtccgcctctcg

SEQ ID NO: 7812 - DNA, 16 bp, Homo sapiens
acagaaactagtagtg

SEQ ID NO: 7813 - DNA, 16 bp, Homo sapiens
gagccgagtttgaagt

SEQ ID NO: 7814 - DNA, 12 bp, Homo sapiens
gcatattggtgc

SEQ ID NO: 7815 - DNA, 16 bp, Homo sapiens
acccggcctaccggca

SEQ ID NO: 7816 - DNA, 16 bp, Homo sapiens
agatagggtcttatac

SEQ ID NO: 7817 - DNA, 16 bp, Homo sapiens
gagatcttcactctgg

SEQ ID NO: 7818 - DNA, 16 bp, Homo sapiens
tggggtgcaggggtat

SEQ ID NO: 7819 - DNA, 16 bp, Homo sapiens
gggagcaacggctaca

SEQ ID NO: 7820 - DNA, 16 bp, Homo sapiens
gcagccttgtatctag

SEQ ID NO: 7821 - DNA, 20 bp, Homo sapiens
gtcgtagtctcctgcagcgt

SEQ ID NO: 7822 - DNA, 16 bp, Homo sapiens
agtcactgtcctggta

SEQ ID NO: 7823 - DNA, 20 bp, Homo sapiens
tctagaaggtatgtggcatt

SEQ ID NO: 7824 - DNA, 16 bp, Homo sapiens
tgagcattggccggcc

SEQ ID NO: 7825 - DNA, 16 bp, Homo sapiens
ctcggccagttcggat

SEQ ID NO: 7826 - DNA, 16 bp, Homo sapiens
ccgtcttctttaaaat

SEQ ID NO: 7827 - DNA, 16 bp, Homo sapiens
gtcatgcaagatatgt

SEQ ID NO: 7828 - DNA, 20 bp, Homo sapiens
tgaaagcgcaagtcctcaaa

SEQ ID NO: 7829 - DNA, 20 bp, Homo sapiens
ttatgatcacttggaagatt

SEQ ID NO: 7830 - DNA, 16 bp, Homo sapiens
caggtcgtcaagctga

SEQ ID NO: 7831 - DNA, 14 bp, Homo sapiens
accgccaaatttaa

SEQ ID NO: 7832 - DNA, 16 bp, Homo sapiens
gagccacacatatggc

SEQ ID NO: 7833 - DNA, 16 bp, Homo sapiens
atattccacactacaa

SEQ ID NO: 7834 - DNA, 16 bp, Homo sapiens
ccattagcaggagctc

SEQ ID NO: 7835 - DNA, 16 bp, Homo sapiens
ccaaggcttggtgtgc

SEQ ID NO: 7836 - DNA, 16 bp, Homo sapiens
agggcctggctccgcg

SEQ ID NO: 7837 - DNA, 15 bp, Homo sapiens
attccatcaaaattg

SEQ ID NO: 7838 - DNA, 16 bp, Homo sapiens
tgaaaaccttcatagc

SEQ ID NO: 7839 - DNA, 12 bp, Homo sapiens
gaacaaaaaccg

SEQ ID NO: 7840 - DNA, 16 bp, Homo sapiens
gaggaactactttgta

SEQ ID NO: 7841 - DNA, 16 bp, Homo sapiens
cacctggtcacttgcc

SEQ ID NO: 7842 - DNA, 14 bp, Homo sapiens
aggctcccagacat

SEQ ID NO: 7843 - DNA, 16 bp, Homo sapiens
gaagagtctgattctt

SEQ ID NO: 7844 - DNA, 16 bp, Homo sapiens
ccagcctcgtcattgt

SEQ ID NO: 7845 - DNA, 16 bp, Homo sapiens
aggacaggtcattttc

SEQ ID NO: 7846 - DNA, 18 bp, Homo sapiens
ccatcacaccacctgacc

SEQ ID NO: 7847 - DNA, 14 bp, Homo sapiens
tactgtaagtctga

SEQ ID NO: 7848 - DNA, 12 bp, Homo sapiens
ctgaatgagggt

SEQ ID NO: 7849 - DNA, 16 bp, Homo sapiens
ttaaaatgccttgccg

SEQ ID NO: 7850 - DNA, 16 bp, Homo sapiens
ttttacctgcgtagct

SEQ ID NO: 7851 - DNA, 16 bp, Homo sapiens
ccggagaagccctggg

SEQ ID NO: 7852 - DNA, 16 bp, Homo sapiens
caaggtcttcttgggc

SEQ ID NO: 7853 - DNA, 16 bp, Homo sapiens
tgcctgcactctgtat

SEQ ID NO: 7854 - DNA, 16 bp, Homo sapiens
tgcccagcaatatatc

SEQ ID NO: 7855 - DNA, 20 bp, Homo sapiens
agacaagtatgaatattact

SEQ ID NO: 7856 - DNA, 16 bp, Homo sapiens
tactacttgttaagcc

SEQ ID NO: 7857 - DNA, 16 bp, Homo sapiens
cgttaagagtattaat

SEQ ID NO: 7858 - DNA, 16 bp, Homo sapiens
gggcaccggggttcca

SEQ ID NO: 7859 - DNA, 12 bp, Homo sapiens
gggaacaacaac

SEQ ID NO: 7860 - DNA, 16 bp, Homo sapiens
aggtggcatcattccc

SEQ ID NO: 7861 - DNA, 16 bp, Homo sapiens
tgtagtcaacctctca

SEQ ID NO: 7862 - DNA, 16 bp, Homo sapiens
acagcctgttatgatg

SEQ ID NO: 7863 - DNA, 18 bp, Homo sapiens
tctgtcaccaactgaagt

SEQ ID NO: 7864 - DNA, 16 bp, Homo sapiens
gtatatgaatgtcaac

SEQ ID NO: 7865 - DNA, 16 bp, Homo sapiens
tgcatgaggtctggtt

SEQ ID NO: 7866 - DNA, 16 bp, Homo sapiens
aagatataacaggatt

SEQ ID NO: 7867 - DNA, 16 bp, Homo sapiens
ccaggttggctttcaa

SEQ ID NO: 7868 - DNA, 14 bp, Homo sapiens
tatccatttctgcg

SEQ ID NO: 7869 - DNA, 16 bp, Homo sapiens
aagtaacccttacctc

SEQ ID NO: 7870 - DNA, 14 bp, Homo sapiens
acattatgacaccg

SEQ ID NO: 7871 - DNA, 16 bp, Homo sapiens
attgccacaggtcacc

SEQ ID NO: 7872 - DNA, 16 bp, Homo sapiens
cgtctacaaggacctg

SEQ ID NO: 7873 - DNA, 18 bp, Homo sapiens
ctttcgacctggagaaca

SEQ ID NO: 7874 - DNA, 14 bp, Homo sapiens
tggcgggactcttt

SEQ ID NO: 7875 - DNA, 16 bp, Homo sapiens
tccctatcatgctgac

SEQ ID NO: 7876 - DNA, 16 bp, Homo sapiens
ttcctgatcagtcaga

SEQ ID NO: 7877 - DNA, 16 bp, Homo sapiens
ggttcccatttgagct

SEQ ID NO: 7878 - DNA, 16 bp, Homo sapiens
gtcatgctaaatgtgt

SEQ ID NO: 7879 - DNA, 16 bp, Homo sapiens
ggagttacatgtctag

SEQ ID NO: 7880 - DNA, 14 bp, Homo sapiens
gtgcaggatcagtg

SEQ ID NO: 7881 - DNA, 16 bp, Homo sapiens
agatatactgtggaag

SEQ ID NO: 7882 - DNA, 16 bp, Homo sapiens
ctgccacccataccgc

SEQ ID NO: 7883 - DNA, 12 bp, Homo sapiens
cgcctgtgagca

SEQ ID NO: 7884 - DNA, 20 bp, Homo sapiens
cccaggggacggtcatctac

SEQ ID NO: 7885 - DNA, 18 bp, Homo sapiens
agaagcagctgcggcggg

SEQ ID NO: 7886 - DNA, 16 bp, Homo sapiens
taggactggacattgc

SEQ ID NO: 7887 - DNA, 16 bp, Homo sapiens
agctggccacggtcat

SEQ ID NO: 7888 - DNA, 16 bp, Homo sapiens
tccgtgccgtctccgt

SEQ ID NO: 7889 - DNA, 16 bp, Homo sapiens
tgtgctgagcatatgg

SEQ ID NO: 7890 - DNA, 16 bp, Homo sapiens
gtcaacctctcaaaaa

SEQ ID NO: 7891 - DNA, 20 bp, Homo sapiens
tttggataacgacctgaaga

SEQ ID NO: 7892 - DNA, 12 bp, Homo sapiens
ccacatggcctg

SEQ ID NO: 7893 - DNA, 16 bp, Homo sapiens
gtgcccaggtaaggcc

SEQ ID NO: 7894 - DNA, 16 bp, Homo sapiens
gctccatcggccagag

SEQ ID NO: 7895 - DNA, 16 bp, Homo sapiens
gtcatggacatgaatg

SEQ ID NO: 7896 - DNA, 18 bp, Homo sapiens
gccctccctgactccctg

SEQ ID NO: 7897 - DNA, 14 bp, Homo sapiens
tcagctgtgtgcac

SEQ ID NO: 7898 - DNA, 16 bp, Homo sapiens
ggtgttgcactttggg

SEQ ID NO: 7899 - DNA, 16 bp, Homo sapiens
gtgcctgcactctgta

SEQ ID NO: 7900 - DNA, 18 bp, Homo sapiens
ggagaggccgagcggctc

SEQ ID NO: 7901 - DNA, 20 bp, Homo sapiens
cttgggcaaaggtggaaatg

SEQ ID NO: 7902 - DNA, 20 bp, Homo sapiens
ctgagcaacacgagggaaac

SEQ ID NO: 7903 - DNA, 16 bp, Homo sapiens
cgtgcatatatttgtt

SEQ ID NO: 7904 - DNA, 16 bp, Homo sapiens
ggacaccgcactgcgc

SEQ ID NO: 7905 - DNA, 16 bp, Homo sapiens
acataccataatacct

SEQ ID NO: 7906 - DNA, 16 bp, Homo sapiens
cggtagtgcccagctg

SEQ ID NO: 7907 - DNA, 16 bp, Homo sapiens
ctcagctcacttgtag

SEQ ID NO: 7908 - DNA, 16 bp, Homo sapiens
acctaagaccataacc

SEQ ID NO: 7909 - DNA, 12 bp, Homo sapiens
gtttcacaagat

SEQ ID NO: 7910 - DNA, 16 bp, Homo sapiens
cagtgtaccagtaagc

SEQ ID NO: 7911 - DNA, 16 bp, Homo sapiens
actgtaaacagttcca

SEQ ID NO: 7912 - DNA, 16 bp, Homo sapiens
acctcccgagttcttt

SEQ ID NO: 7913 - DNA, 16 bp, Homo sapiens
aggcagccagatctgc

SEQ ID NO: 7914 - DNA, 16 bp, Homo sapiens
agttgagtccctggta

SEQ ID NO: 7915 - DNA, 16 bp, Homo sapiens
ctggaggtcactacct

SEQ ID NO: 7916 - DNA, 16 bp, Homo sapiens
ggactccaccatgtac

SEQ ID NO: 7917 - DNA, 14 bp, Homo sapiens
ttggcaccacaaag

SEQ ID NO: 7918 - DNA, 16 bp, Homo sapiens
tctggggccctccgcc

SEQ ID NO: 7919 - DNA, 16 bp, Homo sapiens
acatgccgagtttttg

SEQ ID NO: 7920 - DNA, 16 bp, Homo sapiens
ccatagtccagatgta

SEQ ID NO: 7921 - DNA, 16 bp, Homo sapiens
agctctctatattaga

SEQ ID NO: 7922 - DNA, 14 bp, Homo sapiens
atgttcagtggcgg

SEQ ID NO: 7923 - DNA, 16 bp, Homo sapiens
cggccatattaaccac

SEQ ID NO: 7924 - DNA, 16 bp, Homo sapiens
acatctgcagaagacg

SEQ ID NO: 7925 - DNA, 16 bp, Homo sapiens
accatgtaccttgcac

SEQ ID NO: 7926 - DNA, 12 bp, Homo sapiens
gccagcaacatc

SEQ ID NO: 7927 - DNA, 18 bp, Homo sapiens
agccactgactttgagtt

SEQ ID NO: 7928 - DNA, 19 bp, Homo sapiens
gagccttcttgttctctct

SEQ ID NO: 7929 - DNA, 16 bp, Homo sapiens
acccggccaataaaac

SEQ ID NO: 7930 - DNA, 16 bp, Homo sapiens
gcatggctgtgttatt

SEQ ID NO: 7931 - DNA, 16 bp, Homo sapiens
ggcagggacccttggt

SEQ ID NO: 7932 - DNA, 16 bp, Homo sapiens
tgtccctcagctccgg

SEQ ID NO: 7933 - DNA, 16 bp, Homo sapiens
gcgagactgtttccag

SEQ ID NO: 7934 - DNA, 16 bp, Homo sapiens
aaaaggctgtatgcgg

SEQ ID NO: 7935 - DNA, 16 bp, Homo sapiens
tgataggttcataaca

SEQ ID NO: 7936 - DNA, 16 bp, Homo sapiens
taccagtaagctcagt

SEQ ID NO: 7937 - DNA, 16 bp, Homo sapiens
ggtgtgccaatagtgt

SEQ ID NO: 7938 - DNA, 16 bp, Homo sapiens
tgttgatctcgtggtc

SEQ ID NO: 7939 - DNA, 16 bp, Homo sapiens
cagacacaaagtggag

SEQ ID NO: 7940 - DNA, 16 bp, Homo sapiens
gggatagggagtggca

SEQ ID NO: 7941 - DNA, 16 bp, Homo sapiens
ccagaccagaattcat

SEQ ID NO: 7942 - DNA, 16 bp, Homo sapiens
tgtgcacaccctttac

SEQ ID NO: 7943 - DNA, 12 bp, Homo sapiens
tcgacctgtacc

SEQ ID NO: 7944 - DNA, 16 bp, Homo sapiens
ccagtgttagatttcc

SEQ ID NO: 7945 - DNA, 16 bp, Homo sapiens
gaaatgtgttgatctc

SEQ ID NO: 7946 - DNA, 18 bp, Homo sapiens
aactgccatctccaaact

SEQ ID NO: 7947 - DNA, 18 bp, Homo sapiens
tgggatgaagtacaagaa

SEQ ID NO: 7948 - DNA, 16 bp, Homo sapiens
gaacggctgtatcaat

SEQ ID NO: 7949 - DNA, 16 bp, Homo sapiens
agcaagaccaaatgca

SEQ ID NO: 7950 - DNA, 20 bp, Homo sapiens
aaactcaagcaactgtcata

SEQ ID NO: 7951 - DNA, 18 bp, Homo sapiens
gcacaaacgaggggagta

SEQ ID NO: 7952 - DNA, 20 bp, Homo sapiens
gcgaaaaatggaacatgatg

SEQ ID NO: 7953 - DNA, 16 bp, Homo sapiens
agcctgtgtacttcca

SEQ ID NO: 7954 - DNA, 16 bp, Homo sapiens
ccaagacccttgtcat

SEQ ID NO: 7955 - DNA, 16 bp, Homo sapiens
ccacaatcccaaattc

SEQ ID NO: 7956 - DNA, 16 bp, Homo sapiens
ttaaacctctattggg

SEQ ID NO: 7957 - DNA, 12 bp, Homo sapiens
cctgaccaatct

SEQ ID NO: 7958 - DNA, 16 bp, Homo sapiens
cgagatgaatcatatt

SEQ ID NO: 7959 - DNA, 16 bp, Homo sapiens
gctcctgaacttggag

SEQ ID NO: 7960 - DNA, 16 bp, Homo sapiens
gtaagtgcctgcactc

SEQ ID NO: 7961 - DNA, 16 bp, Homo sapiens
ctgcacattattaaac

SEQ ID NO: 7962 - DNA, 25 bp, Homo sapiens
tacaggaactccaggatggcattgg

SEQ ID NO: 7963 - DNA, 25 bp, Homo sapiens
acaccttcagaaccggaggcaacag

SEQ ID NO: 7964 - DNA, 20 bp, Homo sapiens
aaaagataagttctgaacgt

SEQ ID NO: 7965 - DNA, 14 bp, Homo sapiens
gccgcggtgttcat

SEQ ID NO: 7966 - DNA, 18 bp, Homo sapiens
gaacatcatcttccggat

SEQ ID NO: 7967 - DNA, 16 bp, Homo sapiens
aggaaaccataatctt

SEQ ID NO: 7968 - DNA, 16 bp, Homo sapiens
gttatattggctatga

SEQ ID NO: 7969 - DNA, 16 bp, Homo sapiens
cgtgtttaaaattgat

SEQ ID NO: 7970 - DNA, 20 bp, Homo sapiens
caatcaagaagttgcattaa

SEQ ID NO: 7971 - DNA, 16 bp, Homo sapiens
gccaggcgtggtctgc

SEQ ID NO: 7972 - DNA, 16 bp, Homo sapiens
gggtgaaaggatcatc

SEQ ID NO: 7973 - DNA, 20 bp, Homo sapiens
gatgaagagaggcatgttgg

SEQ ID NO: 7974 - DNA, 16 bp, Homo sapiens
tccgagtgccttgccc

SEQ ID NO: 7975 - DNA, 16 bp, Homo sapiens
agtgcacaattaacac

SEQ ID NO: 7976 - DNA, 16 bp, Homo sapiens
cgtatcctgtttgtgc

SEQ ID NO: 7977 - DNA, 18 bp, Homo sapiens
caggtccgcaagaacaag

SEQ ID NO: 7978 - DNA, 16 bp, Homo sapiens
gtgactcagttacttg

SEQ ID NO: 7979 - DNA, 16 bp, Homo sapiens
aacttgaccctcatcg

SEQ ID NO: 7980 - DNA, 16 bp, Homo sapiens
gctgtcctacctcatg

SEQ ID NO: 7981 - DNA, 15 bp, Homo sapiens
cactggtggtaagtt

SEQ ID NO: 7982 - DNA, 16 bp, Homo sapiens
accatgcctaaacttt

SEQ ID NO: 7983 - DNA, 17 bp, Homo sapiens
tcatcctcagtgaggaa

SEQ ID NO: 7984 - DNA, 16 bp, Homo sapiens
gctgagccaccataca

SEQ ID NO: 7985 - DNA, 16 bp, Homo sapiens
gaggggcccttcgtgt

SEQ ID NO: 7986 - DNA, 18 bp, Homo sapiens
attcagaaatttaaacaa

SEQ ID NO: 7987 - DNA, 16 bp, Homo sapiens
cggaggccagtttagc

SEQ ID NO: 7988 - DNA, 16 bp, Homo sapiens
ccctccgcattttcta

SEQ ID NO: 7989 - DNA, 16 bp, Homo sapiens
cctgttgaatatagta

SEQ ID NO: 7990 - DNA, 30 bp, Homo sapiens
ctagaaatgccatcttccttgatgttggag

SEQ ID NO: 7991 - DNA, 16 bp, Homo sapiens
ggtttgccaagtaggt

SEQ ID NO: 7992 - DNA, 12 bp, Homo sapiens
caagtggcttgg

SEQ ID NO: 7993 - DNA, 16 bp, Homo sapiens
taatagcacttctttc

SEQ ID NO: 7994 - DNA, 20 bp, Homo sapiens
ctcctgcaaggaggggacct

SEQ ID NO: 7995 - DNA, 16 bp, Homo sapiens
ggcgaggagcgcaggg

SEQ ID NO: 7996 - DNA, 16 bp, Homo sapiens
tgtgcgtgccgtcagc

SEQ ID NO: 7997 - DNA, 18 bp, Homo sapiens
gggatggtgcctgtggga

SEQ ID NO: 7998 - DNA, 16 bp, Homo sapiens
gtgcatactgatagtc

SEQ ID NO: 7999 - DNA, 20 bp, Homo sapiens
gggacctctctctaatcagc

SEQ ID NO: 8000 - DNA, 16 bp, Homo sapiens
cccgtatatttttgta

SEQ ID NO: 8001 - DNA, 16 bp, Homo sapiens
gctggaggtgtctcta

SEQ ID NO: 8002 - DNA, 14 bp, Homo sapiens
caatcacaagacca

SEQ ID NO: 8003 - DNA, 16 bp, Homo sapiens
caacatggacctggcc

SEQ ID NO: 8004 - DNA, 25 bp, Homo sapiens
tacaagaacaccttcagaaccggag

SEQ ID NO: 8005 - DNA, 16 bp, Homo sapiens
caggcctgaggtgtac

SEQ ID NO: 8006 - DNA, 20 bp, Homo sapiens
tgtgatctcactctcaggag

SEQ ID NO: 8007 - DNA, 16 bp, Homo sapiens
gcctgaggtgtacata

SEQ ID NO: 8008 - DNA, 16 bp, Homo sapiens
tgccaccaccatttgg

SEQ ID NO: 8009 - DNA, 16 bp, Homo sapiens
agcatcctgtaaatca

SEQ ID NO: 8010 - DNA, 25 bp, Homo sapiens
caagaacaccttcagaaccggaggc

SEQ ID NO: 8011 - DNA, 16 bp, Homo sapiens
cgaatagtaatttaca

SEQ ID NO: 8012 - DNA, 20 bp, Homo sapiens
gatcagttgtcaccattaga

SEQ ID NO: 8013 - DNA, 16 bp, Homo sapiens
ctgaatgaggggtcca

SEQ ID NO: 8014 - DNA, 16 bp, Homo sapiens
gtcagcttccttaggt

SEQ ID NO: 8015 - DNA, 16 bp, Homo sapiens
aacaggattattctgc

SEQ ID NO: 8016 - DNA, 16 bp, Homo sapiens
ggttgtccttaataac

SEQ ID NO: 8017 - DNA, 16 bp, Homo sapiens
taagagggctcttgga

SEQ ID NO: 8018 - DNA, 16 bp, Homo sapiens
agcctgggtcattact

SEQ ID NO: 8019 - DNA, 16 bp, Homo sapiens
ctacaaggacctgcgg

SEQ ID NO: 8020 - DNA, 16 bp, Homo sapiens
ggcagtgtaccagtaa

SEQ ID NO: 8021 - DNA, 16 bp, Homo sapiens
gggcggggagcaacgg

SEQ ID NO: 8022 - DNA, 16 bp, Homo sapiens
ccgggacttccttccc

SEQ ID NO: 8023 - DNA, 14 bp, Homo sapiens
tctaaggatcagtg

SEQ ID NO: 8024 - DNA, 16 bp, Homo sapiens
gccctgatttctatct

SEQ ID NO: 8025 - DNA, 12 bp, Homo sapiens
tcacctggctca

SEQ ID NO: 8026 - DNA, 16 bp, Homo sapiens
gggctatgtgggtggt

SEQ ID NO: 8027 - DNA, 16 bp, Homo sapiens
agtttgaagtgtgttg

SEQ ID NO: 8028 - DNA, 12 bp, Homo sapiens
gtcagtgcagga

SEQ ID NO: 8029 - DNA, 16 bp, Homo sapiens
gatcccttttctcatg

SEQ ID NO: 8030 - DNA, 16 bp, Homo sapiens
agtgagggtcatagca

SEQ ID NO: 8031 - DNA, 12 bp, Homo sapiens
tgaccacagtcg

SEQ ID NO: 8032 - DNA, 21 bp, Homo sapiens
tgggcaatggacacgcaactg

SEQ ID NO: 8033 - DNA, 16 bp, Homo sapiens
agtcaacctctcaaaa

SEQ ID NO: 8034 - DNA, 20 bp, Homo sapiens
gattttctgttagggccaat

SEQ ID NO: 8035 - DNA, 16 bp, Homo sapiens
gacctgggcatttcaa

SEQ ID NO: 8036 - DNA, 16 bp, Homo sapiens
tctgagtcctcataca

SEQ ID NO: 8037 - DNA, 14 bp, Homo sapiens
ggacctgcaccaaa

SEQ ID NO: 8038 - DNA, 16 bp, Homo sapiens
tagggcttatctggaa

SEQ ID NO: 8039 - DNA, 16 bp, Homo sapiens
agctgttactatactg

SEQ ID NO: 8040 - DNA, 16 bp, Homo sapiens
aaccagttgccttgca

SEQ ID NO: 8041 - DNA, 14 bp, Homo sapiens
caattactgtaagt

SEQ ID NO: 8042 - DNA, 16 bp, Homo sapiens
gctgtccttgccaaac

SEQ ID NO: 8043 - DNA, 16 bp, Homo sapiens
ttgttctcatctccgc

SEQ ID NO: 8044 - DNA, 25 bp, Homo sapiens
cttacagatgttgataccacctatc

SEQ ID NO: 8045 - DNA, 14 bp, Homo sapiens
aaccctgagggcaa

SEQ ID NO: 8046 - DNA, 16 bp, Homo sapiens
aactttcggcccgacg

SEQ ID NO: 8047 - DNA, 16 bp, Homo sapiens
tccaccatgctttatg

SEQ ID NO: 8048 - DNA, 16 bp, Homo sapiens
tcggtgtagttttgga

SEQ ID NO: 8049 - DNA, 20 bp, Homo sapiens
ccatgaggagattcgtgaga

SEQ ID NO: 8050 - DNA, 18 bp, Homo sapiens
agctcgtctaccagaaca

SEQ ID NO: 8051 - DNA, 16 bp, Homo sapiens
ttcgcaaaatttctgc

SEQ ID NO: 8052 - DNA, 16 bp, Homo sapiens
accggatgacttaatc

SEQ ID NO: 8053 - DNA, 16 bp, Homo sapiens
ctcctcggcagaccag

SEQ ID NO: 8054 - DNA, 16 bp, Homo sapiens
tgcagcactggcagct

SEQ ID NO: 8055 - DNA, 16 bp, Homo sapiens
agcaattgtgattgta

SEQ ID NO: 8056 - DNA, 18 bp, Homo sapiens
agtgccatcaagaccctg

SEQ ID NO: 8057 - DNA, 12 bp, Homo sapiens
gaggatggattc

SEQ ID NO: 8058 - DNA, 20 bp, Homo sapiens
ggccaaggaccaatgcagta

SEQ ID NO: 8059 - DNA, 16 bp, Homo sapiens
ccgtttcccttgcgca

SEQ ID NO: 8060 - DNA, 19 bp, Homo sapiens
gatgtgtctattgaagatt

SEQ ID NO: 8061 - DNA, 25 bp, Homo sapiens
gaccgacaagggtaggtaacacata

SEQ ID NO: 8062 - DNA, 15 bp, Homo sapiens
ccagaggctagcagt

SEQ ID NO: 8063 - DNA, 16 bp, Homo sapiens
ggtagcatcccaggcc

SEQ ID NO: 8064 - DNA, 16 bp, Homo sapiens
gggattcataatatgt

SEQ ID NO: 8065 - DNA, 16 bp, Homo sapiens
tcatgtgttatagata

SEQ ID NO: 8066 - DNA, 16 bp, Homo sapiens
cgcccttaaactcttt

SEQ ID NO: 8067 - DNA, 16 bp, Homo sapiens
ccatctcggccagttc

SEQ ID NO: 8068 - DNA, 14 bp, Homo sapiens
agtacatggctgca

SEQ ID NO: 8069 - DNA, 14 bp, Homo sapiens
tcagaggcgctatg

SEQ ID NO: 8070 - DNA, 12 bp, Homo sapiens
gctgaccaccag

SEQ ID NO: 8071 - DNA, 18 bp, Homo sapiens
ccaccttgggctacctgc

SEQ ID NO: 8072 - DNA, 18 bp, Homo sapiens
aagtaaggaccagagaca

SEQ ID NO: 8073 - DNA, 16 bp, Homo sapiens
gcgttaaggtgtagtg

SEQ ID NO: 8074 - DNA, 16 bp, Homo sapiens
ccggcggcctctcatt

SEQ ID NO: 8075 - DNA, 26 bp, Homo sapiens
ttacaggaactccaggatggcattgg

SEQ ID NO: 8076 - DNA, 16 bp, Homo sapiens
gaaacccagagtagta

SEQ ID NO: 8077 - DNA, 20 bp, Homo sapiens
tcatccatgtgaccatgagg

SEQ ID NO: 8078 - DNA, 16 bp, Homo sapiens
cggcccaccattatcc

SEQ ID NO: 8079 - DNA, 16 bp, Homo sapiens
tgtgttatagataacc

SEQ ID NO: 8080 - DNA, 16 bp, Homo sapiens
cccgcagtccatgcgc

SEQ ID NO: 8081 - DNA, 16 bp, Homo sapiens
gggcccaagcctggcg

SEQ ID NO: 8082 - DNA, 16 bp, Homo sapiens
aagttgctcccgttga

SEQ ID NO: 8083 - DNA, 16 bp, Homo sapiens
tgtacatagtccttcc

SEQ ID NO: 8084 - DNA, 16 bp, Homo sapiens
agctctccgggggcgc

SEQ ID NO: 8085 - DNA, 16 bp, Homo sapiens
gtgccaaggctctttg

SEQ ID NO: 8086 - DNA, 16 bp, Homo sapiens
tgctgatcgacattga

SEQ ID NO: 8087 - DNA, 16 bp, Homo sapiens
tggcgaggcccttcag

SEQ ID NO: 8088 - DNA, 16 bp, Homo sapiens
taaagtctagaaaatt

SEQ ID NO: 8089 - DNA, 16 bp, Homo sapiens
ccatctagatatctat

SEQ ID NO: 8090 - DNA, 20 bp, Homo sapiens
attaggggacagatcttgag

SEQ ID NO: 8091 - DNA, 16 bp, Homo sapiens
gatccgtgatgtggag

SEQ ID NO: 8092 - DNA, 18 bp, Homo sapiens
tccacagggttttgacac

SEQ ID NO: 8093 - DNA, 16 bp, Homo sapiens
cataccataataccta

SEQ ID NO: 8094 - DNA, 20 bp, Homo sapiens
acgttgtgaggtaagtaagt

SEQ ID NO: 8095 - DNA, 20 bp, Homo sapiens
ccttcttcaggcgtggacaa

SEQ ID NO: 8096 - DNA, 16 bp, Homo sapiens
tggttccaccatgtct

SEQ ID NO: 8097 - DNA, 16 bp, Homo sapiens
tgaggtgtacatagtc

SEQ ID NO: 8098 - DNA, 20 bp, Homo sapiens
ttaccaccctgaggagctgc

SEQ ID NO: 8099 - DNA, 25 bp, Homo sapiens
caggatggcattgggcagcggcaaa

SEQ ID NO: 8100 - DNA, 15 bp, Homo sapiens
ccagtgcgtggggct

SEQ ID NO: 8101 - DNA, 16 bp, Homo sapiens
cgaatgttctcttttg

SEQ ID NO: 8102 - DNA, 12 bp, Homo sapiens
cattatgaaagt

SEQ ID NO: 8103 - DNA, 16 bp, Homo sapiens
ccctggtggcttgcgg

SEQ ID NO: 8104 - DNA, 16 bp, Homo sapiens
gcggttcaggaatcgt

SEQ ID NO: 8105 - DNA, 16 bp, Homo sapiens
gcctaggttagattta

SEQ ID NO: 8106 - DNA, 16 bp, Homo sapiens
cagtaagctcagttcc

SEQ ID NO: 8107 - DNA, 16 bp, Homo sapiens
agctgcatatggcaaa

SEQ ID NO: 8108 - DNA, 16 bp, Homo sapiens
aaatagcccagataag

SEQ ID NO: 8109 - DNA, 16 bp, Homo sapiens
gctcagatagctgagc

SEQ ID NO: 8110 - DNA, 16 bp, Homo sapiens
ccggcatgaactagcc

SEQ ID NO: 8111 - DNA, 15 bp, Homo sapiens
tgacctttgaagttt

SEQ ID NO: 8112 - DNA, 16 bp, Homo sapiens
gtgtcctggtatgttt

SEQ ID NO: 8113 - DNA, 16 bp, Homo sapiens
tggcgtactaatgact

SEQ ID NO: 8114 - DNA, 16 bp, Homo sapiens
caagatacagagcggt

SEQ ID NO: 8115 - DNA, 16 bp, Homo sapiens
aaaaacaaccgtaacc

SEQ ID NO: 8116 - DNA, 16 bp, Homo sapiens
cgacctggttatccag

SEQ ID NO: 8117 - DNA, 16 bp, Homo sapiens
ctaagtcttggttgac

SEQ ID NO: 8118 - DNA, 16 bp, Homo sapiens
gcccggccaccattgc

SEQ ID NO: 8119 - DNA, 16 bp, Homo sapiens
cctgaggtgtacatag

SEQ ID NO: 8120 - DNA, 16 bp, Homo sapiens
caccagacaattgttg

SEQ ID NO: 8121 - DNA, 16 bp, Homo sapiens
aacacatcatctgtat

SEQ ID NO: 8122 - DNA, 16 bp, Homo sapiens
gtgacacactttcgcg

SEQ ID NO: 8123 - DNA, 16 bp, Homo sapiens
gttcccgtgggggcag

SEQ ID NO: 8124 - DNA, 12 bp, Homo sapiens
gtgaagctcatg

SEQ ID NO: 8125 - DNA, 15 bp, Homo sapiens
ctgggccctcgtttt

SEQ ID NO: 8126 - DNA, 16 bp, Homo sapiens
ccatggccaggtaggc

SEQ ID NO: 8127 - DNA, 16 bp, Homo sapiens
acatagtgaatcccga

SEQ ID NO: 8128 - DNA, 16 bp, Homo sapiens
cttgaccaccaatgtg

SEQ ID NO: 8129 - DNA, 16 bp, Homo sapiens
acctcaggttctggca

SEQ ID NO: 8130 - DNA, 18 bp, Homo sapiens
acacttctggctcacagg

SEQ ID NO: 8131 - DNA, 16 bp, Homo sapiens
atggtcctatgtagaa

SEQ ID NO: 8132 - DNA, 16 bp, Homo sapiens
gaaaaccttcatagct

SEQ ID NO: 8133 - DNA, 16 bp, Homo sapiens
aggtgtccacatataa

SEQ ID NO: 8134 - DNA, 16 bp, Homo sapiens
ccttcccggccatatt

SEQ ID NO: 8135 - DNA, 20 bp, Homo sapiens
ttttatgagcttgctcatca

SEQ ID NO: 8136 - DNA, 16 bp, Homo sapiens
cgttgagaagaggcta

SEQ ID NO: 8137 - DNA, 16 bp, Homo sapiens
ggtcgctcgggtcggg

SEQ ID NO: 8138 - DNA, 16 bp, Homo sapiens
tgagtaacatgttatg

SEQ ID NO: 8139 - DNA, 16 bp, Homo sapiens
gcgaggacggctgact

SEQ ID NO: 8140 - DNA, 16 bp, Homo sapiens
acagggtccttctaga

SEQ ID NO: 8141 - DNA, 16 bp, Homo sapiens
agggagtgccatgttg

SEQ ID NO: 8142 - DNA, 16 bp, Homo sapiens
cccggcctaccggcac

SEQ ID NO: 8143 - DNA, 18 bp, Homo sapiens
agaaatggcggcgttttc

SEQ ID NO: 8144 - DNA, 23 bp, Homo sapiens
cagcagcattgcaaagtgcaacg

SEQ ID NO: 8145 - DNA, 16 bp, Homo sapiens
aacagcctcctttaga

SEQ ID NO: 8146 - DNA, 16 bp, Homo sapiens
accacaaccgttttac

SEQ ID NO: 8147 - DNA, 16 bp, Homo sapiens
gggacataattatcca

SEQ ID NO: 8148 - DNA, 14 bp, Homo sapiens
tcaaacccactggg

SEQ ID NO: 8149 - DNA, 18 bp, Homo sapiens
caacagttgaatgaaatg

SEQ ID NO: 8150 - DNA, 16 bp, Homo sapiens
tctgaaatgtgtcgac

SEQ ID NO: 8151 - DNA, 16 bp, Homo sapiens
aaaggctgtatgcggt

SEQ ID NO: 8152 - DNA, 16 bp, Homo sapiens
accagaacccttgaca

SEQ ID NO: 8153 - DNA, 16 bp, Homo sapiens
ctgtggctgctcactt

SEQ ID NO: 8154 - DNA, 12 bp, Homo sapiens
tccttccaagca

SEQ ID NO: 8155 - DNA, 16 bp, Homo sapiens
taagagtacattccga

SEQ ID NO: 8156 - DNA, 14 bp, Homo sapiens
cgttagcagaaaca

SEQ ID NO: 8157 - DNA, 16 bp, Homo sapiens
ctgacagctgcatatg

SEQ ID NO: 8158 - DNA, 16 bp, Homo sapiens
ccagagtgcttttatg

SEQ ID NO: 8159 - DNA, 16 bp, Homo sapiens
tggaagcttttaaacc

SEQ ID NO: 8160 - DNA, 14 bp, Homo sapiens
tctgtgttaagaat

SEQ ID NO: 8161 - DNA, 16 bp, Homo sapiens
tgtgtggggtactatg

SEQ ID NO: 8162 - DNA, 16 bp, Homo sapiens
ctatcatgctgacagc

SEQ ID NO: 8163 - DNA, 16 bp, Homo sapiens
tggggcctagatgggt

SEQ ID NO: 8164 - DNA, 19 bp, Homo sapiens
ttgtgtgactttttcagag

SEQ ID NO: 8165 - DNA, 16 bp, Homo sapiens
cccggttgcgagagga

SEQ ID NO: 8166 - DNA, 20 bp, Homo sapiens
tgacacaacctgtggttact

SEQ ID NO: 8167 - DNA, 20 bp, Homo sapiens
actatgccaacttctgctca

SEQ ID NO: 8168 - DNA, 12 bp, Homo sapiens
caggatcagtgg

SEQ ID NO: 8169 - DNA, 16 bp, Homo sapiens
tcccatctcggccagt

SEQ ID NO: 8170 - DNA, 16 bp, Homo sapiens
cccacactgcttgtca

SEQ ID NO: 8171 - DNA, 16 bp, Homo sapiens
accggatgaggcggcg

SEQ ID NO: 8172 - DNA, 16 bp, Homo sapiens
ttcatgaggttaatac

SEQ ID NO: 8173 - DNA, 15 bp, Homo sapiens
agccatcaaatccag

SEQ ID NO: 8174 - DNA, 16 bp, Homo sapiens
ttctatggccctgatc

SEQ ID NO: 8175 - DNA, 12 bp, Homo sapiens
agttataggaac

SEQ ID NO: 8176 - DNA, 16 bp, Homo sapiens
aaatccagaggctagc

SEQ ID NO: 8177 - DNA, 16 bp, Homo sapiens
gggcccatggatagga

SEQ ID NO: 8178 - DNA, 16 bp, Homo sapiens
agcatcaccttaatca

SEQ ID NO: 8179 - DNA, 16 bp, Homo sapiens
gcaagtccaaaaagtt

SEQ ID NO: 8180 - DNA, 20 bp, Homo sapiens
gaagaagagggtggaagcca

SEQ ID NO: 8181 - DNA, 16 bp, Homo sapiens
ttctatctcctatgca

SEQ ID NO: 8182 - DNA, 16 bp, Homo sapiens
ggaagagcgggtgggc

SEQ ID NO: 8183 - DNA, 15 bp, Homo sapiens
gaagagaggcatgtt

SEQ ID NO: 8184 - DNA, 16 bp, Homo sapiens
gccgcggggccaggtc

SEQ ID NO: 8185 - DNA, 16 bp, Homo sapiens
ggcaaagtaaccctta

SEQ ID NO: 8186 - DNA, 16 bp, Homo sapiens
gggcaaattttaatgg

SEQ ID NO: 8187 - DNA, 19 bp, Homo sapiens
tcctgataaacattaaaca

SEQ ID NO: 8188 - DNA, 16 bp, Homo sapiens
atgtggccctgcgtct

SEQ ID NO: 8189 - DNA, 16 bp, Homo sapiens
ccgccaggacttgggg

SEQ ID NO: 8190 - DNA, 20 bp, Homo sapiens
aactcagttaaaatgtctgt

SEQ ID NO: 8191 - DNA, 16 bp, Homo sapiens
ccaacagtgacctctt

SEQ ID NO: 8192 - DNA, 16 bp, Homo sapiens
tccaatctcttattgc

SEQ ID NO: 8193 - DNA, 16 bp, Homo sapiens
gtttggggattaggtt

SEQ ID NO: 8194 - DNA, 16 bp, Homo sapiens
cctcgttaagagtatt

SEQ ID NO: 8195 - DNA, 12 bp, Homo sapiens
ccaatgttcagt

SEQ ID NO: 8196 - DNA, 16 bp, Homo sapiens
atcaatcgcatcttcc

SEQ ID NO: 8197 - DNA, 16 bp, Homo sapiens
gcccaccattatccgc

SEQ ID NO: 8198 - DNA, 16 bp, Homo sapiens
cggttccgtcacctcc

SEQ ID NO: 8199 - DNA, 14 bp, Homo sapiens
agacttgacctata

SEQ ID NO: 8200 - DNA, 14 bp, Homo sapiens
gacaaatatgggca

SEQ ID NO: 8201 - DNA, 16 bp, Homo sapiens
ccaaggcctacggacc

SEQ ID NO: 8202 - DNA, 16 bp, Homo sapiens
gaaagcccatgtaggg

SEQ ID NO: 8203 - DNA, 16 bp, Homo sapiens
cgtgcagcactggcag

SEQ ID NO: 8204 - DNA, 16 bp, Homo sapiens
gcagcccatttttgga

SEQ ID NO: 8205 - DNA, 16 bp, Homo sapiens
tgtatgcggtggttca

SEQ ID NO: 8206 - DNA, 16 bp, Homo sapiens
ggggtgttgcactttg

SEQ ID NO: 8207 - DNA, 16 bp, Homo sapiens
acctcccgggtatcac

SEQ ID NO: 8208 - DNA, 16 bp, Homo sapiens
tgtggctgccaaatga

SEQ ID NO: 8209 - DNA, 16 bp, Homo sapiens
cgcgtgcgtgccggca

SEQ ID NO: 8210 - DNA, 16 bp, Homo sapiens
cagaaaacccttaggg

SEQ ID NO: 8211 - DNA, 16 bp, Homo sapiens
ccaagccaataatgag

SEQ ID NO: 8212 - DNA, 16 bp, Homo sapiens
ggtgcgtaatctcagc

SEQ ID NO: 8213 - DNA, 16 bp, Homo sapiens
tgaccctcatcgacct

SEQ ID NO: 8214 - DNA, 16 bp, Homo sapiens
ttacttggccctgctg

SEQ ID NO: 8215 - DNA, 18 bp, Homo sapiens
gaggacccgggcatccag

SEQ ID NO: 8216 - DNA, 16 bp, Homo sapiens
aaaaggcgataagtat

SEQ ID NO: 8217 - DNA, 16 bp, Homo sapiens
tcattcccacataaca

SEQ ID NO: 8218 - DNA, 16 bp, Homo sapiens
gagctaatcaatacag

SEQ ID NO: 8219 - DNA, 20 bp, Homo sapiens
gctgtggccaggccagcacc

SEQ ID NO: 8220 - DNA, 16 bp, Homo sapiens
aggttgtccttaataa

SEQ ID NO: 8221 - DNA, 18 bp, Homo sapiens
gggtcaaagaagtcaaag

SEQ ID NO: 8222 - DNA, 16 bp, Homo sapiens
gccgatattaatccat

SEQ ID NO: 8223 - DNA, 16 bp, Homo sapiens
ctcacctatctttgaa

SEQ ID NO: 8224 - DNA, 16 bp, Homo sapiens
tcagaacgggaacttc

SEQ ID NO: 8225 - DNA, 23 bp, Homo sapiens
atcaagttataaaatcacagagg

SEQ ID NO: 8226 - DNA, 20 bp, Homo sapiens
tgttttaaaggacacagatt

SEQ ID NO: 8227 - DNA, 12 bp, Homo sapiens
ggcgggactctt

SEQ ID NO: 8228 - DNA, 16 bp, Homo sapiens
tgtgtctgctatgctc

SEQ ID NO: 8229 - DNA, 16 bp, Homo sapiens
caggattcctttccga

SEQ ID NO: 8230 - DNA, 16 bp, Homo sapiens
ccactgcaatgcagaa

SEQ ID NO: 8231 - DNA, 16 bp, Homo sapiens
attggccgaggtgggg

SEQ ID NO: 8232 - DNA, 16 bp, Homo sapiens
gcatagcagcatggat

SEQ ID NO: 8233 - DNA, 16 bp, Homo sapiens
cctgacccggatgaac

SEQ ID NO: 8234 - DNA, 16 bp, Homo sapiens
ggtgtccacatataaa

SEQ ID NO: 8235 - DNA, 16 bp, Homo sapiens
ttgagcagtcctacat

SEQ ID NO: 8236 - DNA, 16 bp, Homo sapiens
ggactctaccaaggtc

SEQ ID NO: 8237 - DNA, 16 bp, Homo sapiens
gttataatagcacttc

SEQ ID NO: 8238 - DNA, 14 bp, Homo sapiens
ttagacttgaccta

SEQ ID NO: 8239 - DNA, 16 bp, Homo sapiens
aaagtaacccttacct

SEQ ID NO: 8240 - DNA, 18 bp, Homo sapiens
gcagctgaggagtggagg

SEQ ID NO: 8241 - DNA, 16 bp, Homo sapiens
atggctcggggtgaag

SEQ ID NO: 8242 - DNA, 16 bp, Homo sapiens
ccaaactctgctttac

SEQ ID NO: 8243 - DNA, 16 bp, Homo sapiens
agccgggagcgggcgt

SEQ ID NO: 8244 - DNA, 16 bp, Homo sapiens
catccgcgacctcatg

SEQ ID NO: 8245 - DNA, 16 bp, Homo sapiens
tgggtgatgtatcctg

SEQ ID NO: 8246 - DNA, 16 bp, Homo sapiens
gctgactgccgagtca

SEQ ID NO: 8247 - DNA, 14 bp, Homo sapiens
agattactgcatcc

SEQ ID NO: 8248 - DNA, 20 bp, Homo sapiens
cacactggtggtaagttttc

SEQ ID NO: 8249 - DNA, 16 bp, Homo sapiens
aaagcaggtcgtcaag

SEQ ID NO: 8250 - DNA, 16 bp, Homo sapiens
cctgtggctgctcact

SEQ ID NO: 8251 - DNA, 16 bp, Homo sapiens
ctacggaccatcggtg

SEQ ID NO: 8252 - DNA, 16 bp, Homo sapiens
ggagtcaccagataca

SEQ ID NO: 8253 - DNA, 14 bp, Homo sapiens
caacatctcctgcc

SEQ ID NO: 8254 - DNA, 20 bp, Homo sapiens
cacaagcaacaaacctcact

SEQ ID NO: 8255 - DNA, 20 bp, Homo sapiens
catcagcaagttcatgggac

SEQ ID NO: 8256 - DNA, 16 bp, Homo sapiens
gcccaggagaacacct

SEQ ID NO: 8257 - DNA, 16 bp, Homo sapiens
ccatcaaccttcgagt

SEQ ID NO: 8258 - DNA, 26 bp, Homo sapiens
ttccttgatgttggaggtacctgctc

SEQ ID NO: 8259 - DNA, 16 bp, Homo sapiens
gtgtactgttctgtgc

SEQ ID NO: 8260 - DNA, 16 bp, Homo sapiens
atcaggtggacactct

SEQ ID NO: 8261 - DNA, 16 bp, Homo sapiens
tcgtcaccacttacat

SEQ ID NO: 8262 - DNA, 16 bp, Homo sapiens
agtgagacctcgtgtg

SEQ ID NO: 8263 - DNA, 16 bp, Homo sapiens
tgcgtggtctcaggca

SEQ ID NO: 8264 - DNA, 16 bp, Homo sapiens
tcggggctccctctgc

SEQ ID NO: 8265 - DNA, 16 bp, Homo sapiens
tggtgggacaataggg

SEQ ID NO: 8266 - DNA, 16 bp, Homo sapiens
gctgacagctgcatat

SEQ ID NO: 8267 - DNA, 16 bp, Homo sapiens
cctcggctgccagagg

SEQ ID NO: 8268 - DNA, 16 bp, Homo sapiens
gtgtcaacccttcgtg

SEQ ID NO: 8269 - DNA, 19 bp, Homo sapiens
taaacattcccttggatgt

SEQ ID NO: 8270 - DNA, 16 bp, Homo sapiens
aggatgctgtctcgtt

SEQ ID NO: 8271 - DNA, 16 bp, Homo sapiens
ccctctggcatctact

SEQ ID NO: 8272 - DNA, 16 bp, Homo sapiens
gacagctgtgagtgcc

SEQ ID NO: 8273 - DNA, 20 bp, Homo sapiens
agcaactgtcatatataaca

SEQ ID NO: 8274 - DNA, 18 bp, Homo sapiens
gagaaagcaggcgggcgg

SEQ ID NO: 8275 - DNA, 16 bp, Homo sapiens
gagtctcagggtggca

SEQ ID NO: 8276 - DNA, 16 bp, Homo sapiens
ggtatatcaacttccc

SEQ ID NO: 8277 - DNA, 16 bp, Homo sapiens
aggtggatgcatagtt

SEQ ID NO: 8278 - DNA, 16 bp, Homo sapiens
cgctactgctgtccct

SEQ ID NO: 8279 - DNA, 16 bp, Homo sapiens
tgtctgttggattcac

SEQ ID NO: 8280 - DNA, 16 bp, Homo sapiens
gtaccttacttcagga

SEQ ID NO: 8281 - DNA, 16 bp, Homo sapiens
ttcgaccttcctgggc

SEQ ID NO: 8282 - DNA, 16 bp, Homo sapiens
tagagaatctagtggt

SEQ ID NO: 8283 - DNA, 16 bp, Homo sapiens
agctcccaagattgat

SEQ ID NO: 8284 - DNA, 18 bp, Homo sapiens
cttcaccaagctcgtcta

SEQ ID NO: 8285 - DNA, 16 bp, Homo sapiens
agtgggctcggtagtg

SEQ ID NO: 8286 - DNA, 16 bp, Homo sapiens
cgagtcactgtcctgg

SEQ ID NO: 8287 - DNA, 14 bp, Homo sapiens
caaagtgcagcacc

SEQ ID NO: 8288 - DNA, 16 bp, Homo sapiens
aggtaagggtctccgt

SEQ ID NO: 8289 - DNA, 16 bp, Homo sapiens
ctgcccttccatcgcc

SEQ ID NO: 8290 - DNA, 16 bp, Homo sapiens
gtgttgatctcgtggt

SEQ ID NO: 8291 - DNA, 16 bp, Homo sapiens
gttagctggtaattag

SEQ ID NO: 8292 - DNA, 16 bp, Homo sapiens
agagttacttattgac

SEQ ID NO: 8293 - DNA, 16 bp, Homo sapiens
actgtttgttgaaacc

SEQ ID NO: 8294 - DNA, 16 bp, Homo sapiens
aatggcttcgatttca

SEQ ID NO: 8295 - DNA, 20 bp, Homo sapiens
ctcccttcaacaaacagaat

SEQ ID NO: 8296 - DNA, 16 bp, Homo sapiens
gcactgagctgatata

SEQ ID NO: 8297 - DNA, 16 bp, Homo sapiens
gctccgtgccgtctcc

SEQ ID NO: 8298 - DNA, 16 bp, Homo sapiens
cgtgagagttatttac

SEQ ID NO: 8299 - DNA, 20 bp, Homo sapiens
ggaggtctggcctataaagt

SEQ ID NO: 8300 - DNA, 16 bp, Homo sapiens
tggatgcatagttgca

SEQ ID NO: 8301 - DNA, 16 bp, Homo sapiens
gaagatgtccctagca

SEQ ID NO: 8302 - DNA, 16 bp, Homo sapiens
acatgcccgtatattt

SEQ ID NO: 8303 - DNA, 16 bp, Homo sapiens
tccagcttcagtaggg

SEQ ID NO: 8304 - DNA, 18 bp, Homo sapiens
ctatgaagagcctaaaca

SEQ ID NO: 8305 - DNA, 14 bp, Homo sapiens
agcgaggggcatca

SEQ ID NO: 8306 - DNA, 18 bp, Homo sapiens
ttcaggcggttgcttatg

SEQ ID NO: 8307 - DNA, 16 bp, Homo sapiens
accacttgtcattcct

SEQ ID NO: 8308 - DNA, 16 bp, Homo sapiens
cccagctgttactata

SEQ ID NO: 8309 - DNA, 16 bp, Homo sapiens
actgagctgatatata

SEQ ID NO: 8310 - DNA, 16 bp, Homo sapiens
gcctggcgggatgttg

SEQ ID NO: 8311 - DNA, 16 bp, Homo sapiens
cgttttttgaatacta

SEQ ID NO: 8312 - DNA, 18 bp, Homo sapiens
tctgctgtccttttgcat

SEQ ID NO: 8313 - DNA, 16 bp, Homo sapiens
atgcattcgtttttca

SEQ ID NO: 8314 - DNA, 16 bp, Homo sapiens
tgatgaagtccggcag

SEQ ID NO: 8315 - DNA, 17 bp, Homo sapiens
gacagacaatagaaaag

SEQ ID NO: 8316 - DNA, 16 bp, Homo sapiens
tgacacctccatgccc

SEQ ID NO: 8317 - DNA, 16 bp, Homo sapiens
acaagtccatccgcga

SEQ ID NO: 8318 - DNA, 18 bp, Homo sapiens
ggctgctctccaatgtta

SEQ ID NO: 8319 - DNA, 16 bp, Homo sapiens
gtccaaaaagtttaca

SEQ ID NO: 8320 - DNA, 16 bp, Homo sapiens
gctgttgattgaagat

SEQ ID NO: 8321 - DNA, 12 bp, Homo sapiens
caacaactcgca

SEQ ID NO: 8322 - DNA, 25 bp, Homo sapiens
acaagaacaccttcagaaccggagg

SEQ ID NO: 8323 - DNA, 16 bp, Homo sapiens
ctggttatccaggagc

SEQ ID NO: 8324 - DNA, 20 bp, Homo sapiens
taatggaccagtgaaggtgt

SEQ ID NO: 8325 - DNA, 16 bp, Homo sapiens
cggatctccttaagcc

SEQ ID NO: 8326 - DNA, 16 bp, Homo sapiens
ctgcgggactctgggg

SEQ ID NO: 8327 - DNA, 16 bp, Homo sapiens
cgcttgctattcgggt

SEQ ID NO: 8328 - DNA, 16 bp, Homo sapiens
acaagatgccattcta

SEQ ID NO: 8329 - DNA, 20 bp, Homo sapiens
ccgaagctgaccagcagatg

SEQ ID NO: 8330 - DNA, 16 bp, Homo sapiens
cgggccggccttgccc

SEQ ID NO: 8331 - DNA, 16 bp, Homo sapiens
cgtggatggtatttca

SEQ ID NO: 8332 - DNA, 16 bp, Homo sapiens
gtgaatcttatcagga

SEQ ID NO: 8333 - DNA, 20 bp, Homo sapiens
ggtggcaagaatctgcccac

SEQ ID NO: 8334 - DNA, 12 bp, Homo sapiens
gtgtctttcaaa

SEQ ID NO: 8335 - DNA, 16 bp, Homo sapiens
tgaacttgaccctcat

SEQ ID NO: 8336 - DNA, 18 bp, Homo sapiens
cctatgccctgcccttcc

SEQ ID NO: 8337 - DNA, 16 bp, Homo sapiens
gtccaaacaggttgga

SEQ ID NO: 8338 - DNA, 18 bp, Homo sapiens
atctgtcatctctctggg

SEQ ID NO: 8339 - DNA, 16 bp, Homo sapiens
tatgaccaccctgtga

SEQ ID NO: 8340 - DNA, 16 bp, Homo sapiens
aaggtgttgatattct

SEQ ID NO: 8341 - DNA, 16 bp, Homo sapiens
acaggaaacacatcat

SEQ ID NO: 8342 - DNA, 16 bp, Homo sapiens
ggcaaggcattaagca

SEQ ID NO: 8343 - DNA, 16 bp, Homo sapiens
tacctaatccttttga

SEQ ID NO: 8344 - DNA, 16 bp, Homo sapiens
gcatcacccgctgatt

SEQ ID NO: 8345 - DNA, 16 bp, Homo sapiens
ggacataattatccat

SEQ ID NO: 8346 - DNA, 16 bp, Homo sapiens
gcgggcggggagcaac

SEQ ID NO: 8347 - DNA, 16 bp, Homo sapiens
gtcttattggtttcgt

SEQ ID NO: 8348 - DNA, 16 bp, Homo sapiens
tgatcatagatcatag

SEQ ID NO: 8349 - DNA, 16 bp, Homo sapiens
aagatccgtgatgtgg

SEQ ID NO: 8350 - DNA, 16 bp, Homo sapiens
ggtcaagtgggccaag

SEQ ID NO: 8351 - DNA, 16 bp, Homo sapiens
ggtgtctctattgcgg

SEQ ID NO: 8352 - DNA, 16 bp, Homo sapiens
ctgcactctgtattct

SEQ ID NO: 8353 - DNA, 16 bp, Homo sapiens
accagagcttaattaa

SEQ ID NO: 8354 - DNA, 16 bp, Homo sapiens
tgcacacagcgtgctg

SEQ ID NO: 8355 - DNA, 18 bp, Homo sapiens
gctcacaggaaagtgtct

SEQ ID NO: 8356 - DNA, 18 bp, Homo sapiens
aagagacttctctgtaaa

SEQ ID NO: 8357 - DNA, 16 bp, Homo sapiens
gtgctgcaccagtgca

SEQ ID NO: 8358 - DNA, 14 bp, Homo sapiens
atggaatcatgccc

SEQ ID NO: 8359 - DNA, 16 bp, Homo sapiens
ctcttgactgattaca

SEQ ID NO: 8360 - DNA, 16 bp, Homo sapiens
ggtgtccagcatacac

SEQ ID NO: 8361 - DNA, 18 bp, Homo sapiens
gaacgtgacatccatcat

SEQ ID NO: 8362 - DNA, 16 bp, Homo sapiens
caacggcgcaatcatg

SEQ ID NO: 8363 - DNA, 14 bp, Homo sapiens
cctactgtagctca

SEQ ID NO: 8364 - DNA, 16 bp, Homo sapiens
gaatcgtcaccactta

SEQ ID NO: 8365 - DNA, 16 bp, Homo sapiens
tgtccagcatacaccc

SEQ ID NO: 8366 - DNA, 16 bp, Homo sapiens
aaacaggttggaaaac

SEQ ID NO: 8367 - DNA, 16 bp, Homo sapiens
cgtcaccacttacatc

SEQ ID NO: 8368 - DNA, 16 bp, Homo sapiens
ctcaagatccgtgatg

SEQ ID NO: 8369 - DNA, 16 bp, Homo sapiens
cacaggaaacacatca

SEQ ID NO: 8370 - DNA, 12 bp, Homo sapiens
agccttgcttac

SEQ ID NO: 8371 - DNA, 19 bp, Homo sapiens
gacttgggcaaaggtggaa

SEQ ID NO: 8372 - DNA, 16 bp, Homo sapiens
tgttgccagagtggga

SEQ ID NO: 8373 - DNA, 25 bp, Homo sapiens
ggcaggaggtctgcaaacagctgtc

SEQ ID NO: 8374 - DNA, 16 bp, Homo sapiens
catctccggggtgggt

SEQ ID NO: 8375 - DNA, 18 bp, Homo sapiens
tcagaaccggaggcaaca

SEQ ID NO: 8376 - DNA, 20 bp, Homo sapiens
gctggatcacagacagctca

SEQ ID NO: 8377 - DNA, 16 bp, Homo sapiens
ccaatgctgatatcca

SEQ ID NO: 8378 - DNA, 16 bp, Homo sapiens
accgggcttttcaccc

SEQ ID NO: 8379 - DNA, 16 bp, Homo sapiens
ccgtggcccttctgta

SEQ ID NO: 8380 - DNA, 15 bp, Homo sapiens
atggtatggaaatat

SEQ ID NO: 8381 - DNA, 16 bp, Homo sapiens
tgcctcttgctcccgg

SEQ ID NO: 8382 - DNA, 15 bp, Homo sapiens
ggagttatggagatg

SEQ ID NO: 8383 - DNA, 25 bp, Homo sapiens
aagaaataattcagcaatcctcaaa

SEQ ID NO: 8384 - DNA, 16 bp, Homo sapiens
ggggaacccggtcagc

SEQ ID NO: 8385 - DNA, 15 bp, Homo sapiens
ccaggttgcagctgc

SEQ ID NO: 8386 - DNA, 16 bp, Homo sapiens
gaagccctataataaa

SEQ ID NO: 8387 - DNA, 14 bp, Homo sapiens
tcttcataccagga

SEQ ID NO: 8388 - DNA, 16 bp, Homo sapiens
cctcccgggtatcacc

SEQ ID NO: 8389 - DNA, 14 bp, Homo sapiens
agttcaacttctgt

SEQ ID NO: 8390 - DNA, 16 bp, Homo sapiens
tccaaacaggttggaa

SEQ ID NO: 8391 - DNA, 16 bp, Homo sapiens
aacaggttggaaaacg

SEQ ID NO: 8392 - DNA, 18 bp, Homo sapiens
atcgttggggatggtgcc

SEQ ID NO: 8393 - DNA, 16 bp, Homo sapiens
actggctgccatgttc

SEQ ID NO: 8394 - DNA, 16 bp, Homo sapiens
gccaacagtgacctct

SEQ ID NO: 8395 - DNA, 16 bp, Homo sapiens
atctctctggtttcgc

SEQ ID NO: 8396 - DNA, 14 bp, Homo sapiens
agccatcatcaaag

SEQ ID NO: 8397 - DNA, 16 bp, Homo sapiens
gcggcccttttaaata

SEQ ID NO: 8398 - DNA, 16 bp, Homo sapiens
ctctcctatgctctgc

SEQ ID NO: 8399 - DNA, 12 bp, Homo sapiens
aatgttcagtgg

SEQ ID NO: 8400 - DNA, 16 bp, Homo sapiens
ggagtcaggaccgggc

SEQ ID NO: 8401 - DNA, 16 bp, Homo sapiens
cccggccatattaacc

SEQ ID NO: 8402 - DNA, 16 bp, Homo sapiens
ggtcgtgggctaaggg

SEQ ID NO: 8403 - DNA, 16 bp, Homo sapiens
ggccaatgaaattgct

SEQ ID NO: 8404 - DNA, 16 bp, Homo sapiens
gttgccctgggtataa

SEQ ID NO: 8405 - DNA, 16 bp, Homo sapiens
agctgaaagagccctg

SEQ ID NO: 8406 - DNA, 16 bp, Homo sapiens
agacatcaatatctct

SEQ ID NO: 8407 - DNA, 20 bp, Homo sapiens
ccaggtctcctgaaatggga

SEQ ID NO: 8408 - DNA, 16 bp, Homo sapiens
gatctgttccgtgctg

SEQ ID NO: 8409 - DNA, 16 bp, Homo sapiens
ggggggcaaggttgca

SEQ ID NO: 8410 - DNA, 16 bp, Homo sapiens
cgctgtgtcctaatga

SEQ ID NO: 8411 - DNA, 16 bp, Homo sapiens
cgccctgtgcgtgcct

SEQ ID NO: 8412 - DNA, 20 bp, Homo sapiens
ggaagacacttcagatctga

SEQ ID NO: 8413 - DNA, 16 bp, Homo sapiens
agtcaggacggggctc

SEQ ID NO: 8414 - DNA, 16 bp, Homo sapiens
gtgctatgcctttgct

SEQ ID NO: 8415 - DNA, 16 bp, Homo sapiens
gcctcgttcctccgag

SEQ ID NO: 8416 - DNA, 20 bp, Homo sapiens
gaaccaaatccagagtcact

SEQ ID NO: 8417 - DNA, 16 bp, Homo sapiens
ccggccttgccctatt

SEQ ID NO: 8418 - DNA, 16 bp, Homo sapiens
tgctctcggcctggtg

SEQ ID NO: 8419 - DNA, 16 bp, Homo sapiens
ctgtgcaggtattgac

SEQ ID NO: 8420 - DNA, 16 bp, Homo sapiens
gctttcttgcaaaggc

SEQ ID NO: 8421 - DNA, 16 bp, Homo sapiens
tgatgcccaaattggc

SEQ ID NO: 8422 - DNA, 16 bp, Homo sapiens
ttgatgaagtccggca

SEQ ID NO: 8423 - DNA, 16 bp, Homo sapiens
gccctattcctctcct

SEQ ID NO: 8424 - DNA, 25 bp, Homo sapiens
atcagtgggatgaagtacaagaaca

SEQ ID NO: 8425 - DNA, 16 bp, Homo sapiens
taagcctagagtgcac

SEQ ID NO: 8426 - DNA, 16 bp, Homo sapiens
tgatcgacattgagca

SEQ ID NO: 8427 - DNA, 16 bp, Homo sapiens
ggggggtttaaaagct

SEQ ID NO: 8428 - DNA, 16 bp, Homo sapiens
gagctctgctatttcg

SEQ ID NO: 8429 - DNA, 16 bp, Homo sapiens
gacagccgtggctggc

SEQ ID NO: 8430 - DNA, 16 bp, Homo sapiens
agccgagccatccctg

SEQ ID NO: 8431 - DNA, 16 bp, Homo sapiens
ttctataagtgcgggc

SEQ ID NO: 8432 - DNA, 16 bp, Homo sapiens
tacctccttctcggtg

SEQ ID NO: 8433 - DNA, 16 bp, Homo sapiens
ccgggtcttatataca

SEQ ID NO: 8434 - DNA, 18 bp, Homo sapiens
gtacaagaacaccttcag

SEQ ID NO: 8435 - DNA, 16 bp, Homo sapiens
gggctacagtctgtcc

SEQ ID NO: 8436 - DNA, 16 bp, Homo sapiens
gaagtccggcaggaga

SEQ ID NO: 8437 - DNA, 16 bp, Homo sapiens
cctgatctcagtgtat

SEQ ID NO: 8438 - DNA, 16 bp, Homo sapiens
cgtcccagtttctact

SEQ ID NO: 8439 - DNA, 16 bp, Homo sapiens
actcactgatgtccac

SEQ ID NO: 8440 - DNA, 16 bp, Homo sapiens
gcggcagatcgagctg

SEQ ID NO: 8441 - DNA, 16 bp, Homo sapiens
gggtctctcctcctgt

SEQ ID NO: 8442 - DNA, 16 bp, Homo sapiens
gggactctaccaaggt

SEQ ID NO: 8443 - DNA, 14 bp, Homo sapiens
ttggctggcaactt

SEQ ID NO: 8444 - DNA, 20 bp, Homo sapiens
ttagtgtgtagacgtgaagc

SEQ ID NO: 8445 - DNA, 16 bp, Homo sapiens
gcggggccaggtcgtt

SEQ ID NO: 8446 - DNA, 20 bp, Homo sapiens
cgcacactggtggtccatga

SEQ ID NO: 8447 - DNA, 16 bp, Homo sapiens
gcctgccgttagttgt

SEQ ID NO: 8448 - DNA, 16 bp, Homo sapiens
caggagccgtgtggga

SEQ ID NO: 8449 - DNA, 18 bp, Homo sapiens
aaggccaatgcgctcctg

SEQ ID NO: 8450 - DNA, 16 bp, Homo sapiens
ggagtcaggacggggc

SEQ ID NO: 8451 - DNA, 16 bp, Homo sapiens
ttctagcttgatagct

SEQ ID NO: 8452 - DNA, 16 bp, Homo sapiens
aggtaactcactccta

SEQ ID NO: 8453 - DNA, 18 bp, Homo sapiens
cttcctcggcttctcctg

SEQ ID NO: 8454 - DNA, 14 bp, Homo sapiens
cacaacctgctgac

SEQ ID NO: 8455 - DNA, 16 bp, Homo sapiens
cggcctatttgtttga

SEQ ID NO: 8456 - DNA, 16 bp, Homo sapiens
attgcaaaattaggct

SEQ ID NO: 8457 - DNA, 16 bp, Homo sapiens
tcttctgctgatcgac

SEQ ID NO: 8458 - DNA, 16 bp, Homo sapiens
gaagtctgccatctgg

SEQ ID NO: 8459 - DNA, 16 bp, Homo sapiens
gccagggaatttctgc

SEQ ID NO: 8460 - DNA, 16 bp, Homo sapiens
aacagatcttattagt

SEQ ID NO: 8461 - DNA, 16 bp, Homo sapiens
tgcaagtctagttttc

SEQ ID NO: 8462 - DNA, 21 bp, Homo sapiens
agctcctggactgaccactat

SEQ ID NO: 8463 - DNA, 18 bp, Homo sapiens
ctgttgagaaatggcggc

SEQ ID NO: 8464 - DNA, 16 bp, Homo sapiens
gatctgaatttttcgt

SEQ ID NO: 8465 - DNA, 16 bp, Homo sapiens
accatcctgaatgagg

SEQ ID NO: 8466 - DNA, 20 bp, Homo sapiens
atgaagagaggcatgttgga

SEQ ID NO: 8467 - DNA, 18 bp, Homo sapiens
gaggtgtttgagatggcc

SEQ ID NO: 8468 - DNA, 20 bp, Homo sapiens
cttcagaaccggaggcaaca

SEQ ID NO: 8469 - DNA, 16 bp, Homo sapiens
tacaacatttatcggt

SEQ ID NO: 8470 - DNA, 20 bp, Homo sapiens
agtcaccagaacttgtgcac

SEQ ID NO: 8471 - DNA, 15 bp, Homo sapiens
caaaattgcttggga

SEQ ID NO: 8472 - DNA, 16 bp, Homo sapiens
ctgcaagtccaaaaag

SEQ ID NO: 8473 - DNA, 16 bp, Homo sapiens
gccgagtcactgtcct

SEQ ID NO: 8474 - DNA, 12 bp, Homo sapiens
actagctgtggt

SEQ ID NO: 8475 - DNA, 20 bp, Homo sapiens
tgattttactcatccatgtg

SEQ ID NO: 8476 - DNA, 16 bp, Homo sapiens
tctcgtggtctcagag

SEQ ID NO: 8477 - DNA, 16 bp, Homo sapiens
gagtcactgtcctggt

SEQ ID NO: 8478 - DNA, 16 bp, Homo sapiens
tatcctggtgcttcct

SEQ ID NO: 8479 - DNA, 16 bp, Homo sapiens
gtggctgcccgtgggg

SEQ ID NO: 8480 - DNA, 20 bp, Homo sapiens
ggtcaatgacttctactgtg

SEQ ID NO: 8481 - DNA, 16 bp, Homo sapiens
cccagatgcgatctta

SEQ ID NO: 8482 - DNA, 20 bp, Homo sapiens
tcatccctgcgaccatgagg

SEQ ID NO: 8483 - DNA, 16 bp, Homo sapiens
gctgatatccatccat

SEQ ID NO: 8484 - DNA, 16 bp, Homo sapiens
cccatgcaataaagac

SEQ ID NO: 8485 - DNA, 16 bp, Homo sapiens
agtgtaccagtaagct

SEQ ID NO: 8486 - DNA, 16 bp, Homo sapiens
tgtcgattcagtgtgc

SEQ ID NO: 8487 - DNA, 16 bp, Homo sapiens
tggagcccagataaaa

SEQ ID NO: 8488 - DNA, 18 bp, Homo sapiens
gaaaaggagttcatcttt

SEQ ID NO: 8489 - DNA, 16 bp, Homo sapiens
agctgatgctctagct

SEQ ID NO: 8490 - DNA, 20 bp, Homo sapiens
cgacctggtcaatgacttct

SEQ ID NO: 8491 - DNA, 16 bp, Homo sapiens
tccatccatgattgaa

SEQ ID NO: 8492 - DNA, 16 bp, Homo sapiens
tttggccaattattgt

SEQ ID NO: 8493 - DNA, 14 bp, Homo sapiens
tgttcatgcaatat

SEQ ID NO: 8494 - DNA, 16 bp, Homo sapiens
gagcagcacttgtttt

SEQ ID NO: 8495 - DNA, 16 bp, Homo sapiens
aaagtgagcttataca

SEQ ID NO: 8496 - DNA, 16 bp, Homo sapiens
taagaatctcataacc

SEQ ID NO: 8497 - DNA, 16 bp, Homo sapiens
ggggacagttgtagat

SEQ ID NO: 8498 - DNA, 16 bp, Homo sapiens
ggtcggcggcgggcga

SEQ ID NO: 8499 - DNA, 16 bp, Homo sapiens
ctccaatctcttattg

SEQ ID NO: 8500 - DNA, 16 bp, Homo sapiens
cggatgacttaatctc

SEQ ID NO: 8501 - DNA, 16 bp, Homo sapiens
ctgaaatgtgtcgacc

SEQ ID NO: 8502 - DNA, 16 bp, Homo sapiens
ggcggcgaccgtgagg

SEQ ID NO: 8503 - DNA, 16 bp, Homo sapiens
ctatgctgggaccagg

SEQ ID NO: 8504 - DNA, 16 bp, Homo sapiens
tatggcaaagtaaccc

SEQ ID NO: 8505 - DNA, 14 bp, Homo sapiens
gaaactgggccgtg

SEQ ID NO: 8506 - DNA, 16 bp, Homo sapiens
gcgagaggagacagag

SEQ ID NO: 8507 - DNA, 16 bp, Homo sapiens
agggggattcataata

SEQ ID NO: 8508 - DNA, 16 bp, Homo sapiens
ccgacttctacttctt

SEQ ID NO: 8509 - DNA, 20 bp, Homo sapiens
aatgacagctgacaaggaga

SEQ ID NO: 8510 - DNA, 16 bp, Homo sapiens
gctccaatctcttatt

SEQ ID NO: 8511 - DNA, 16 bp, Homo sapiens
tcgttcctccgagctg

SEQ ID NO: 8512 - DNA, 16 bp, Homo sapiens
tgatttatttttgcgc

SEQ ID NO: 8513 - DNA, 16 bp, Homo sapiens
tgtggctgctcacttg

SEQ ID NO: 8514 - DNA, 20 bp, Homo sapiens
tgagagaaatgcttacacac

SEQ ID NO: 8515 - DNA, 18 bp, Homo sapiens
tactcggaggaggacaag

SEQ ID NO: 8516 - DNA, 16 bp, Homo sapiens
acaatccaaagtgagc

SEQ ID NO: 8517 - DNA, 18 bp, Homo sapiens
ccgaagatttgtgtcaaa

SEQ ID NO: 8518 - DNA, 16 bp, Homo sapiens
tttgtatgcctctcag

SEQ ID NO: 8519 - DNA, 18 bp, Homo sapiens
aagcaataatatgattcc

SEQ ID NO: 8520 - DNA, 16 bp, Homo sapiens
agctgcatccataagt

SEQ ID NO: 8521 - DNA, 18 bp, Homo sapiens
tcaacaagaaggacctgc

SEQ ID NO: 8522 - DNA, 20 bp, Homo sapiens
aacttgtacctgaaagcctt

SEQ ID NO: 8523 - DNA, 16 bp, Homo sapiens
agagaacgggaattac

SEQ ID NO: 8524 - DNA, 16 bp, Homo sapiens
ccaggtgtcatggaca

SEQ ID NO: 8525 - DNA, 19 bp, Homo sapiens
taccagtgcaggtcctcac

SEQ ID NO: 8526 - DNA, 12 bp, Homo sapiens
gcagcatcaaat

SEQ ID NO: 8527 - DNA, 16 bp, Homo sapiens
caacaagtccatccgc

SEQ ID NO: 8528 - DNA, 14 bp, Homo sapiens
ccagagccatttcc

SEQ ID NO: 8529 - DNA, 16 bp, Homo sapiens
cccgttgagaagaggc

SEQ ID NO: 8530 - DNA, 16 bp, Homo sapiens
tcaagatacagagcgg

SEQ ID NO: 8531 - DNA, 20 bp, Homo sapiens
aaatgaagaaagtacaaaga

SEQ ID NO: 8532 - DNA, 16 bp, Homo sapiens
agtcctacatcaacac

SEQ ID NO: 8533 - DNA, 16 bp, Homo sapiens
gaatcaccgtgtgcca

SEQ ID NO: 8534 - DNA, 16 bp, Homo sapiens
cgaatcttctatgcga

SEQ ID NO: 8535 - DNA, 12 bp, Homo sapiens
gtagaaattgtc

SEQ ID NO: 8536 - DNA, 16 bp, Homo sapiens
accaattgccctgtgt

SEQ ID NO: 8537 - DNA, 16 bp, Homo sapiens
agcgtgtttgccaaca

SEQ ID NO: 8538 - DNA, 20 bp, Homo sapiens
gacgtggtgttctccatgga

SEQ ID NO: 8539 - DNA, 16 bp, Homo sapiens
cccttacctcaatcaa

SEQ ID NO: 8540 - DNA, 16 bp, Homo sapiens
gcagcttcctatggcg

SEQ ID NO: 8541 - DNA, 18 bp, Homo sapiens
tgcccacccagcaggacg

SEQ ID NO: 8542 - DNA, 16 bp, Homo sapiens
ctggtggaccatgaat

SEQ ID NO: 8543 - DNA, 14 bp, Homo sapiens
aacctctgccagat

SEQ ID NO: 8544 - DNA, 14 bp, Homo sapiens
aggtgcgaagcaga

SEQ ID NO: 8545 - DNA, 16 bp, Homo sapiens
ttcttgcctactgggc

SEQ ID NO: 8546 - DNA, 16 bp, Homo sapiens
ggctgtgaccatcttc

SEQ ID NO: 8547 - DNA, 16 bp, Homo sapiens
ggccagttcggatccc

SEQ ID NO: 8548 - DNA, 16 bp, Homo sapiens
taacaggagatatatg

SEQ ID NO: 8549 - DNA, 16 bp, Homo sapiens
catgccgagtttttgc

SEQ ID NO: 8550 - DNA, 16 bp, Homo sapiens
aggaatcatgtttacg

SEQ ID NO: 8551 - DNA, 18 bp, Homo sapiens
ataaagacaaagccaacc

SEQ ID NO: 8552 - DNA, 16 bp, Homo sapiens
ctcccgggtatcacca

SEQ ID NO: 8553 - DNA, 16 bp, Homo sapiens
ctatctgattttgtag

SEQ ID NO: 8554 - DNA, 16 bp, Homo sapiens
ggaagtcagtgtctag

SEQ ID NO: 8555 - DNA, 16 bp, Homo sapiens
cgacctcccgggtatc

SEQ ID NO: 8556 - DNA, 20 bp, Homo sapiens
cgagcagaaggaaagtaatg

SEQ ID NO: 8557 - DNA, 16 bp, Homo sapiens
agggtttgggatcgtg

SEQ ID NO: 8558 - DNA, 12 bp, Homo sapiens
agtggggaatga

SEQ ID NO: 8559 - DNA, 16 bp, Homo sapiens
ccttctatctcctatg

SEQ ID NO: 8560 - DNA, 14 bp, Homo sapiens
caatgtggcaacag

SEQ ID NO: 8561 - DNA, 16 bp, Homo sapiens
gtcgcctgagaaccgg

SEQ ID NO: 8562 - DNA, 16 bp, Homo sapiens
agcaaccgtgccggct

SEQ ID NO: 8563 - DNA, 16 bp, Homo sapiens
gcaggggtatatcaac

SEQ ID NO: 8564 - DNA, 16 bp, Homo sapiens
gctggacaccgcactg

SEQ ID NO: 8565 - DNA, 16 bp, Homo sapiens
tctccagcacttgagc

SEQ ID NO: 8566 - DNA, 16 bp, Homo sapiens
gggcaaagtcctgtcc

SEQ ID NO: 8567 - DNA, 16 bp, Homo sapiens
gttaactatagtctta

SEQ ID NO: 8568 - DNA, 16 bp, Homo sapiens
accataatacctaatc

SEQ ID NO: 8569 - DNA, 16 bp, Homo sapiens
aggagcttcagtggtc

SEQ ID NO: 8570 - DNA, 16 bp, Homo sapiens
actgggcggacttggg

SEQ ID NO: 8571 - DNA, 20 bp, Homo sapiens
gccgtgtgcgtgctgaaggg

SEQ ID NO: 8572 - DNA, 16 bp, Homo sapiens
aacctctcaaaaaccc

SEQ ID NO: 8573 - DNA, 16 bp, Homo sapiens
atggtagcgcgtgcat

SEQ ID NO: 8574 - DNA, 20 bp, Homo sapiens
aggtggaaatgaagaaagta

SEQ ID NO: 8575 - DNA, 16 bp, Homo sapiens
agccactgggtaatac

SEQ ID NO: 8576 - DNA, 12 bp, Homo sapiens
ggccagtgctaa

SEQ ID NO: 8577 - DNA, 16 bp, Homo sapiens
tgccacacatataaca

SEQ ID NO: 8578 - DNA, 16 bp, Homo sapiens
cttacctcaatcaaga

SEQ ID NO: 8579 - DNA, 18 bp, Homo sapiens
tctcggaagctgcagcca

SEQ ID NO: 8580 - DNA, 20 bp, Homo sapiens
tactgcagggtgaagaatta

SEQ ID NO: 8581 - DNA, 16 bp, Homo sapiens
gatagccaggattgtg

SEQ ID NO: 8582 - DNA, 16 bp, Homo sapiens
tcttcgccatcttcaa

SEQ ID NO: 8583 - DNA, 20 bp, Homo sapiens
gacccacctggtggcagcac

SEQ ID NO: 8584 - DNA, 16 bp, Homo sapiens
ccggggttccatcact

SEQ ID NO: 8585 - DNA, 16 bp, Homo sapiens
tggctggacaccgcac

SEQ ID NO: 8586 - DNA, 16 bp, Homo sapiens
aattagtggtctttag

SEQ ID NO: 8587 - DNA, 16 bp, Homo sapiens
ctctttccgccttgca

SEQ ID NO: 8588 - DNA, 16 bp, Homo sapiens
agggcggccactgggc

SEQ ID NO: 8589 - DNA, 16 bp, Homo sapiens
gaggagtgtgatgtcc

SEQ ID NO: 8590 - DNA, 15 bp, Homo sapiens
ccagcccctgattgg

SEQ ID NO: 8591 - DNA, 16 bp, Homo sapiens
gggtgcctccatgcat

SEQ ID NO: 8592 - DNA, 20 bp, Homo sapiens
ggtggaaatgaagaaagtac

SEQ ID NO: 8593 - DNA, 20 bp, Homo sapiens
tggcatttatttggataaaa

SEQ ID NO: 8594 - DNA, 16 bp, Homo sapiens
gggccctgtgatagag

SEQ ID NO: 8595 - DNA, 20 bp, Homo sapiens
gcatgttggagacttgggca

SEQ ID NO: 8596 - DNA, 16 bp, Homo sapiens
agtttgaccactgtaa

SEQ ID NO: 8597 - DNA, 15 bp, Homo sapiens
gattggaatccagtc

SEQ ID NO: 8598 - DNA, 16 bp, Homo sapiens
ggagagcagcctcatt

SEQ ID NO: 8599 - DNA, 16 bp, Homo sapiens
tagtttagtgctatgc

SEQ ID NO: 8600 - DNA, 16 bp, Homo sapiens
gcgtgacccactacaa

SEQ ID NO: 8601 - DNA, 16 bp, Homo sapiens
agcagtcctacatcaa

SEQ ID NO: 8602 - DNA, 16 bp, Homo sapiens
ctggaaagttactagt

SEQ ID NO: 8603 - DNA, 16 bp, Homo sapiens
gggacagggtggaact

SEQ ID NO: 8604 - DNA, 16 bp, Homo sapiens
ccctggccatatgaca

SEQ ID NO: 8605 - DNA, 16 bp, Homo sapiens
ccgtgccggctttttt

SEQ ID NO: 8606 - DNA, 18 bp, Homo sapiens
tcacacaccagcacttta

SEQ ID NO: 8607 - DNA, 20 bp, Homo sapiens
gcaaaggtggaaatgaagaa

SEQ ID NO: 8608 - DNA, 16 bp, Homo sapiens
tgacagctgcatatgg

SEQ ID NO: 8609 - DNA, 16 bp, Homo sapiens
cctcacctggttgtca

SEQ ID NO: 8610 - DNA, 16 bp, Homo sapiens
gtctccctagcttcaa

SEQ ID NO: 8611 - DNA, 16 bp, Homo sapiens
gtgtccagcatacacc

SEQ ID NO: 8612 - DNA, 16 bp, Homo sapiens
tggtcggtgcctgggc

SEQ ID NO: 8613 - DNA, 16 bp, Homo sapiens
ccaggtcgttgagggt

SEQ ID NO: 8614 - DNA, 16 bp, Homo sapiens
tcgggccgggggccgc

SEQ ID NO: 8615 - DNA, 18 bp, Homo sapiens
gaagacctgcctcctcat

SEQ ID NO: 8616 - DNA, 16 bp, Homo sapiens
ttataatagcacttct

SEQ ID NO: 8617 - DNA, 16 bp, Homo sapiens
gtcctgtggaataggg

SEQ ID NO: 8618 - DNA, 16 bp, Homo sapiens
tgttagaatagtattc

SEQ ID NO: 8619 - DNA, 18 bp, Homo sapiens
caccaccggcatcatcga

SEQ ID NO: 8620 - DNA, 16 bp, Homo sapiens
aatcgtcaccacttac

SEQ ID NO: 8621 - DNA, 20 bp, Homo sapiens
caaatctattacttttgcaa

SEQ ID NO: 8622 - DNA, 16 bp, Homo sapiens
aagccagaccagaatt

SEQ ID NO: 8623 - DNA, 16 bp, Homo sapiens
actggacattgcatct

SEQ ID NO: 8624 - DNA, 16 bp, Homo sapiens
tgagagctgcgtctcc

SEQ ID NO: 8625 - DNA, 16 bp, Homo sapiens
agttgctcccgttgag

SEQ ID NO: 8626 - DNA, 16 bp, Homo sapiens
accggtgtccagcata

SEQ ID NO: 8627 - DNA, 16 bp, Homo sapiens
catcaacaagtccatc

SEQ ID NO: 8628 - DNA, 20 bp, Homo sapiens
ttatttggataaaattctca

SEQ ID NO: 8629 - DNA, 16 bp, Homo sapiens
gcgggcctgtttgtgc

SEQ ID NO: 8630 - DNA, 16 bp, Homo sapiens
gtgagaagcggtttgc

SEQ ID NO: 8631 - DNA, 16 bp, Homo sapiens
tccctgctatatttag

SEQ ID NO: 8632 - DNA, 18 bp, Homo sapiens
atgactctggagtccatc

SEQ ID NO: 8633 - DNA, 16 bp, Homo sapiens
taccagatcaaggaca

SEQ ID NO: 8634 - DNA, 16 bp, Homo sapiens
gccatgttgcatcaga

SEQ ID NO: 8635 - DNA, 16 bp, Homo sapiens
taagatggttgatagt

SEQ ID NO: 8636 - DNA, 16 bp, Homo sapiens
acagcccttgataggt

SEQ ID NO: 8637 - DNA, 16 bp, Homo sapiens
gccagaccagaattca

SEQ ID NO: 8638 - DNA, 16 bp, Homo sapiens
cccagggtttataact

SEQ ID NO: 8639 - DNA, 16 bp, Homo sapiens
tggcctgttataaatg

SEQ ID NO: 8640 - DNA, 16 bp, Homo sapiens
gcgtgctctcgggggg

SEQ ID NO: 8641 - DNA, 16 bp, Homo sapiens
cagttaggcagtgtac

SEQ ID NO: 8642 - DNA, 16 bp, Homo sapiens
tgattgcagcatcatg

SEQ ID NO: 8643 - DNA, 16 bp, Homo sapiens
ttgagtgaccatcttc

SEQ ID NO: 8644 - DNA, 16 bp, Homo sapiens
aggcagtgtaccagta

SEQ ID NO: 8645 - DNA, 16 bp, Homo sapiens
caaggtaaccctgagc

SEQ ID NO: 8646 - DNA, 16 bp, Homo sapiens
ctgccaaatgataaca

SEQ ID NO: 8647 - DNA, 14 bp, Homo sapiens
gaccacctcccaaa

SEQ ID NO: 8648 - DNA, 16 bp, Homo sapiens
gccaaggctacttgtg

SEQ ID NO: 8649 - DNA, 16 bp, Homo sapiens
cccgaatcaatcgcat

SEQ ID NO: 8650 - DNA, 16 bp, Homo sapiens
gtaaaccgtaatttac

SEQ ID NO: 8651 - DNA, 16 bp, Homo sapiens
ccttactaaaccagcc

SEQ ID NO: 8652 - DNA, 18 bp, Homo sapiens
ttgggcagcggcaaactg

SEQ ID NO: 8653 - DNA, 16 bp, Homo sapiens
accaggctccaatctc

SEQ ID NO: 8654 - DNA, 20 bp, Homo sapiens
tgcttggtgctgatttgtga

SEQ ID NO: 8655 - DNA, 16 bp, Homo sapiens
gccatacctgtttgta

SEQ ID NO: 8656 - DNA, 16 bp, Homo sapiens
ctggcctgcaatcaca

SEQ ID NO: 8657 - DNA, 23 bp, Homo sapiens
ggggaagcattaaaggactgact

SEQ ID NO: 8658 - DNA, 16 bp, Homo sapiens
gacctcccgggtatca

SEQ ID NO: 8659 - DNA, 16 bp, Homo sapiens
agagcaaattgtggtg

SEQ ID NO: 8660 - DNA, 20 bp, Homo sapiens
gatgtcactgacactgtgcg

SEQ ID NO: 8661 - DNA, 16 bp, Homo sapiens
ccagatcaaggacatg

SEQ ID NO: 8662 - DNA, 15 bp, Homo sapiens
agcagaaggaaagta

SEQ ID NO: 8663 - DNA, 16 bp, Homo sapiens
aagccctataataaac

SEQ ID NO: 8664 - DNA, 20 bp, Homo sapiens
gtcagaacattgaatgcaac

SEQ ID NO: 8665 - DNA, 16 bp, Homo sapiens
gtgtgatagcttgttg

SEQ ID NO: 8666 - DNA, 18 bp, Homo sapiens
attggaacttctgcttag

SEQ ID NO: 8667 - DNA, 20 bp, Homo sapiens
gctcatcagttgccacttcc

SEQ ID NO: 8668 - DNA, 20 bp, Homo sapiens
agaaatgccatcttccttga

SEQ ID NO: 8669 - DNA, 19 bp, Homo sapiens
ttaatcctctatccagaaa

SEQ ID NO: 8670 - DNA, 18 bp, Homo sapiens
gctcaccaaaatgtgtac

SEQ ID NO: 8671 - DNA, 16 bp, Homo sapiens
aaacccatacatatga

SEQ ID NO: 8672 - DNA, 16 bp, Homo sapiens
cgtcaaatgttatgag

SEQ ID NO: 8673 - DNA, 20 bp, Homo sapiens
tgctgtggccaggccagcac

SEQ ID NO: 8674 - DNA, 20 bp, Homo sapiens
gaacaccttcagaaccggag

SEQ ID NO: 8675 - DNA, 18 bp, Homo sapiens
gcagggcctcaggccggg

SEQ ID NO: 8676 - DNA, 16 bp, Homo sapiens
ctgctctgttaatgct

SEQ ID NO: 8677 - DNA, 16 bp, Homo sapiens
cgacattgagcagtcc

SEQ ID NO: 8678 - DNA, 18 bp, Homo sapiens
gcacctggtggactactt

SEQ ID NO: 8679 - DNA, 25 bp, Homo sapiens
acgaactggtgtaatgatatgtgca

SEQ ID NO: 8680 - DNA, 14 bp, Homo sapiens
cagctagagggcct

SEQ ID NO: 8681 - DNA, 16 bp, Homo sapiens
tcattctggctgtcac

SEQ ID NO: 8682 - DNA, 15 bp, Homo sapiens
aagagcagcaactaa

SEQ ID NO: 8683 - DNA, 20 bp, Homo sapiens
ggaaatgaagaaagtacaaa

SEQ ID NO: 8684 - DNA, 16 bp, Homo sapiens
cctgcagcaactgacc

SEQ ID NO: 8685 - DNA, 16 bp, Homo sapiens
ttgtccaccgtgtgtc

SEQ ID NO: 8686 - DNA, 16 bp, Homo sapiens
atgaagtccggcagga

SEQ ID NO: 8687 - DNA, 16 bp, Homo sapiens
gtctcgtatcctgttt

SEQ ID NO: 8688 - DNA, 16 bp, Homo sapiens
tggttcccatctctac

SEQ ID NO: 8689 - DNA, 16 bp, Homo sapiens
gctaagtgattaaggt

SEQ ID NO: 8690 - DNA, 16 bp, Homo sapiens
gcagtaatggcttcga

SEQ ID NO: 8691 - DNA, 16 bp, Homo sapiens
gctttgtgcagtgccc

SEQ ID NO: 8692 - DNA, 16 bp, Homo sapiens
tggctccacagtctgg

SEQ ID NO: 8693 - DNA, 18 bp, Homo sapiens
gtattatgttgttcaaat

SEQ ID NO: 8694 - DNA, 18 bp, Homo sapiens
ctggctcaatctgtcaac

SEQ ID NO: 8695 - DNA, 20 bp, Homo sapiens
gtgcgtgctgaagggcgacg

SEQ ID NO: 8696 - DNA, 16 bp, Homo sapiens
gagacctcgtgtgtag

SEQ ID NO: 8697 - DNA, 16 bp, Homo sapiens
ctctggagctctccgg

SEQ ID NO: 8698 - DNA, 16 bp, Homo sapiens
actgcttgtcaattac

SEQ ID NO: 8699 - DNA, 12 bp, Homo sapiens
tcctaagaacaa

SEQ ID NO: 8700 - DNA, 16 bp, Homo sapiens
gtttgaggctatgatt

SEQ ID NO: 8701 - DNA, 20 bp, Homo sapiens
caccacaggacagtacagga

SEQ ID NO: 8702 - DNA, 20 bp, Homo sapiens
ttgagaagaggtaggtggac

SEQ ID NO: 8703 - DNA, 20 bp, Homo sapiens
tgaagagaggcatgttggag

SEQ ID NO: 8704 - DNA, 21 bp, Homo sapiens
aaagacacaaattcctgagaa

SEQ ID NO: 8705 - DNA, 16 bp, Homo sapiens
atggccacccttggcc

SEQ ID NO: 8706 - DNA, 14 bp, Homo sapiens
gttcaagaggtgtg

SEQ ID NO: 8707 - DNA, 20 bp, Homo sapiens
cctatatcccaatggatgat

SEQ ID NO: 8708 - DNA, 16 bp, Homo sapiens
cggccatcctctttgg

SEQ ID NO: 8709 - DNA, 16 bp, Homo sapiens
tcctgttcccgtgggg

SEQ ID NO: 8710 - DNA, 16 bp, Homo sapiens
tgagcctgcgttgacc

SEQ ID NO: 8711 - DNA, 16 bp, Homo sapiens
tgctctcgggggggcc

SEQ ID NO: 8712 - DNA, 16 bp, Homo sapiens
attcgaggccattgtg

SEQ ID NO: 8713 - DNA, 16 bp, Homo sapiens
cagcatttactttcac

SEQ ID NO: 8714 - DNA, 16 bp, Homo sapiens
gtgcctttgctaggcc

SEQ ID NO: 8715 - DNA, 16 bp, Homo sapiens
tatgaacggctgtatc

SEQ ID NO: 8716 - DNA, 16 bp, Homo sapiens
ggatggccaagtcagt

SEQ ID NO: 8717 - DNA, 24 bp, Homo sapiens
ttacagatgttgataccacctatc

SEQ ID NO: 8718 - DNA, 16 bp, Homo sapiens
gtgtgcagggggcttc

SEQ ID NO: 8719 - DNA, 16 bp, Homo sapiens
ggcacttgtttcaggc

SEQ ID NO: 8720 - DNA, 14 bp, Homo sapiens
tggaagctgtaaag

SEQ ID NO: 8721 - DNA, 16 bp, Homo sapiens
taataaagttctggtg

SEQ ID NO: 8722 - DNA, 16 bp, Homo sapiens
caagctcaaggatgga

SEQ ID NO: 8723 - DNA, 14 bp, Homo sapiens
gaaagcatgctgaa

SEQ ID NO: 8724 - DNA, 16 bp, Homo sapiens
cagtcctacatcaaca

SEQ ID NO: 8725 - DNA, 16 bp, Homo sapiens
acagagcggttccgtc

SEQ ID NO: 8726 - DNA, 16 bp, Homo sapiens
aaccagatacatttac

SEQ ID NO: 8727 - DNA, 16 bp, Homo sapiens
tcagtttcacctggcg

SEQ ID NO: 8728 - DNA, 20 bp, Homo sapiens
cttcatgaggatgaagtgca

SEQ ID NO: 8729 - DNA, 12 bp, Homo sapiens
tttgggtaaata

SEQ ID NO: 8730 - DNA, 16 bp, Homo sapiens
tcagtccacatttagc

SEQ ID NO: 8731 - DNA, 16 bp, Homo sapiens
ggggactctaccaagg

SEQ ID NO: 8732 - DNA, 16 bp, Homo sapiens
tcttgtaagtaattga

SEQ ID NO: 8733 - DNA, 16 bp, Homo sapiens
tactgatagtatctcc

SEQ ID NO: 8734 - DNA, 16 bp, Homo sapiens
acagaagcctactttc

SEQ ID NO: 8735 - DNA, 16 bp, Homo sapiens
aaagagcacatctccc

SEQ ID NO: 8736 - DNA, 16 bp, Homo sapiens
ctgcgctttagtaagt

SEQ ID NO: 8737 - DNA, 16 bp, Homo sapiens
gaccctctcacttcgg

SEQ ID NO: 8738 - DNA, 16 bp, Homo sapiens
ggaccaggtactggcc

SEQ ID NO: 8739 - DNA, 16 bp, Homo sapiens
tggggtccttatcatt

SEQ ID NO: 8740 - DNA, 16 bp, Homo sapiens
cctataataaacttac

SEQ ID NO: 8741 - DNA, 20 bp, Homo sapiens
caaagatggtgtggccgatg

SEQ ID NO: 8742 - DNA, 16 bp, Homo sapiens
tccacactacaaatac

SEQ ID NO: 8743 - DNA, 14 bp, Homo sapiens
aatggaagaagccc

SEQ ID NO: 8744 - DNA, 16 bp, Homo sapiens
cctgctatatttagtg

SEQ ID NO: 8745 - DNA, 18 bp, Homo sapiens
acaaccgccatccagact

SEQ ID NO: 8746 - DNA, 16 bp, Homo sapiens
tgagtcaccattagga

SEQ ID NO: 8747 - DNA, 14 bp, Homo sapiens
caccaagctctttt

SEQ ID NO: 8748 - DNA, 16 bp, Homo sapiens
tttgccaacagtgacc

SEQ ID NO: 8749 - DNA, 16 bp, Homo sapiens
gtacagtaccaattgc

SEQ ID NO: 8750 - DNA, 12 bp, Homo sapiens
ttgaataaactg

SEQ ID NO: 8751 - DNA, 18 bp, Homo sapiens
cccgttcggtctgaggaa

SEQ ID NO: 8752 - DNA, 20 bp, Homo sapiens
aattgcacaatatattttct

SEQ ID NO: 8753 - DNA, 22 bp, Homo sapiens
gaacaccttcagaaccggaggc

SEQ ID NO: 8754 - DNA, 18 bp, Homo sapiens
agtgaatctgtattgggg

SEQ ID NO: 8755 - DNA, 18 bp, Homo sapiens
aaggagggagtgcgggag

SEQ ID NO: 8756 - DNA, 16 bp, Homo sapiens
aagcagcacaaatctc

SEQ ID NO: 8757 - DNA, 16 bp, Homo sapiens
accactgtaagtgcct

SEQ ID NO: 8758 - DNA, 16 bp, Homo sapiens
acaccatcctgaatga

SEQ ID NO: 8759 - DNA, 20 bp, Homo sapiens
ttcagcaatcctcaaaaaca

SEQ ID NO: 8760 - DNA, 16 bp, Homo sapiens
ttaggcagtgtaccag

SEQ ID NO: 8761 - DNA, 16 bp, Homo sapiens
catcattactctgttg

SEQ ID NO: 8762 - DNA, 16 bp, Homo sapiens
gagacctcacccactc

SEQ ID NO: 8763 - DNA, 12 bp, Homo sapiens
tcgtcagtgcag

SEQ ID NO: 8764 - DNA, 16 bp, Homo sapiens
taaacccagggtggtg

SEQ ID NO: 8765 - DNA, 12 bp, Homo sapiens
gcatcaccatga

SEQ ID NO: 8766 - DNA, 16 bp, Homo sapiens
ctccgggattctagtg

SEQ ID NO: 8767 - DNA, 16 bp, Homo sapiens
ttgctgccttgattac

SEQ ID NO: 8768 - DNA, 16 bp, Homo sapiens
agtgtgacttattacc

SEQ ID NO: 8769 - DNA, 16 bp, Homo sapiens
actgctgaaagttaca

SEQ ID NO: 8770 - DNA, 16 bp, Homo sapiens
gctgcgcccagccggc

SEQ ID NO: 8771 - DNA, 18 bp, Homo sapiens
gccttagtgacagtagca

SEQ ID NO: 8772 - DNA, 16 bp, Homo sapiens
tcggccagttcggatc

SEQ ID NO: 8773 - DNA, 18 bp, Homo sapiens
acttctggctcacaggaa

SEQ ID NO: 8774 - DNA, 20 bp, Homo sapiens
ggctttctctgcttgatcaa

SEQ ID NO: 8775 - DNA, 16 bp, Homo sapiens
aaaacccgcaagtaca

SEQ ID NO: 8776 - DNA, 19 bp, Homo sapiens
tctctggcagaactgtagc

SEQ ID NO: 8777 - DNA, 16 bp, Homo sapiens
ggaccctgtgaataaa

SEQ ID NO: 8778 - DNA, 16 bp, Homo sapiens
gctatactcttttgta

SEQ ID NO: 8779 - DNA, 16 bp, Homo sapiens
ggaactactcatttgt

SEQ ID NO: 8780 - DNA, 16 bp, Homo sapiens
taagcatggcattcgc

SEQ ID NO: 8781 - DNA, 16 bp, Homo sapiens
cccatggttagtttag

SEQ ID NO: 8782 - DNA, 20 bp, Homo sapiens
gcagcaactaaaagaaaagc

SEQ ID NO: 8783 - DNA, 20 bp, Homo sapiens
acagcctggatatgaaattt

SEQ ID NO: 8784 - DNA, 18 bp, Homo sapiens
catccatcatgtttctcg

SEQ ID NO: 8785 - DNA, 16 bp, Homo sapiens
gccatccctgctcgac

SEQ ID NO: 8786 - DNA, 16 bp, Homo sapiens
ccagaattcattcttg

SEQ ID NO: 8787 - DNA, 18 bp, Homo sapiens
ttgcggcacacctgagta

SEQ ID NO: 8788 - DNA, 16 bp, Homo sapiens
gctctgtcgaatagta

SEQ ID NO: 8789 - DNA, 16 bp, Homo sapiens
gtggggtctcattatt

SEQ ID NO: 8790 - DNA, 14 bp, Homo sapiens
ccaacatctcctgc

SEQ ID NO: 8791 - DNA, 16 bp, Homo sapiens
agatacatttacttgt

SEQ ID NO: 8792 - DNA, 17 bp, Homo sapiens
ctgttgagaaatggcgg

SEQ ID NO: 8793 - DNA, 16 bp, Homo sapiens
acagactgttcatgta

SEQ ID NO: 8794 - DNA, 16 bp, Homo sapiens
caccagagatcttcac

SEQ ID NO: 8795 - DNA, 20 bp, Homo sapiens
ggccgtgtgcgtgctgaagg

SEQ ID NO: 8796 - DNA, 14 bp, Homo sapiens
agcaagtgtgacag

SEQ ID NO: 8797 - DNA, 16 bp, Homo sapiens
gtatcaggcctttggc

SEQ ID NO: 8798 - DNA, 16 bp, Homo sapiens
gcctgataccaatgct

SEQ ID NO: 8799 - DNA, 15 bp, Homo sapiens
aatccatgagctatt

SEQ ID NO: 8800 - DNA, 16 bp, Homo sapiens
agagcttaattaagcc

SEQ ID NO: 8801 - DNA, 16 bp, Homo sapiens
gaagctcacagtacat

SEQ ID NO: 8802 - DNA, 16 bp, Homo sapiens
acttaatgttgctctt

SEQ ID NO: 8803 - DNA, 16 bp, Homo sapiens
gaccagtacagtttct

SEQ ID NO: 8804 - DNA, 16 bp, Homo sapiens
gggggactctaccaag

SEQ ID NO: 8805 - DNA, 16 bp, Homo sapiens
aggtaatgagatctaa

SEQ ID NO: 8806 - DNA, 16 bp, Homo sapiens
gggtcttatatacact

SEQ ID NO: 8807 - DNA, 16 bp, Homo sapiens
tgaatatagtatggcc

SEQ ID NO: 8808 - DNA, 16 bp, Homo sapiens
gcaggccttctataag

SEQ ID NO: 8809 - DNA, 16 bp, Homo sapiens
atttctaggtgtgact

SEQ ID NO: 8810 - DNA, 20 bp, Homo sapiens
caaaggtggaaatgaagaaa

SEQ ID NO: 8811 - DNA, 12 bp, Homo sapiens
atagaatttgac

SEQ ID NO: 8812 - DNA, 25 bp, Homo sapiens
gtaagtatactggatcccattctct

SEQ ID NO: 8813 - DNA, 16 bp, Homo sapiens
tggctgctcacttggt

SEQ ID NO: 8814 - DNA, 25 bp, Homo sapiens
ggatgaagtacaagaacaccttcag

SEQ ID NO: 8815 - DNA, 20 bp, Homo sapiens
acatgtgccacacagtgact

SEQ ID NO: 8816 - DNA, 18 bp, Homo sapiens
catgcaggccatgatccg

SEQ ID NO: 8817 - DNA, 20 bp, Homo sapiens
ctgtattgggccttttggat

SEQ ID NO: 8818 - DNA, 16 bp, Homo sapiens
gctgcccgtggaatgc

SEQ ID NO: 8819 - DNA, 16 bp, Homo sapiens
tcaattttgattttca

SEQ ID NO: 8820 - DNA, 16 bp, Homo sapiens
tgggcggccacttctc

SEQ ID NO: 8821 - DNA, 16 bp, Homo sapiens
ctgcgcaaaggggccc

SEQ ID NO: 8822 - DNA, 18 bp, Homo sapiens
gcggcgcgggagttcatc

SEQ ID NO: 8823 - DNA, 14 bp, Homo sapiens
atcgatagcatttg

SEQ ID NO: 8824 - DNA, 12 bp, Homo sapiens
ggaatgcgctct

SEQ ID NO: 8825 - DNA, 16 bp, Homo sapiens
agtccaaacaggttgg

SEQ ID NO: 8826 - DNA, 16 bp, Homo sapiens
ggccatattaaccaca

SEQ ID NO: 8827 - DNA, 16 bp, Homo sapiens
aaccagaaccttccgt

SEQ ID NO: 8828 - DNA, 16 bp, Homo sapiens
atcccatctcggccag

SEQ ID NO: 8829 - DNA, 16 bp, Homo sapiens
gcctgaggttccgggg

SEQ ID NO: 8830 - DNA, 14 bp, Homo sapiens
caaagggacactta

SEQ ID NO: 8831 - DNA, 20 bp, Homo sapiens
cttacacacagaaatggcct

SEQ ID NO: 8832 - DNA, 16 bp, Homo sapiens
tgaggctatgattgtt

SEQ ID NO: 8833 - DNA, 16 bp, Homo sapiens
gccctgggtataagtc

SEQ ID NO: 8834 - DNA, 16 bp, Homo sapiens
tagtcaacctctcaaa

SEQ ID NO: 8835 - DNA, 20 bp, Homo sapiens
atcttaaaagtgtaattgtg

SEQ ID NO: 8836 - DNA, 20 bp, Homo sapiens
gaagagaggcatgttggaga

SEQ ID NO: 8837 - DNA, 13 bp, Homo sapiens
cctggtctgaacc

SEQ ID NO: 8838 - DNA, 16 bp, Homo sapiens
gggtgcaggggtatat

SEQ ID NO: 8839 - DNA, 16 bp, Homo sapiens
tggtagcttcatctgt

SEQ ID NO: 8840 - DNA, 16 bp, Homo sapiens
ccagcagacccatttt

SEQ ID NO: 8841 - DNA, 16 bp, Homo sapiens
ccaaagccagaatgta

SEQ ID NO: 8842 - DNA, 16 bp, Homo sapiens
ccaaggcaggatctgc

SEQ ID NO: 8843 - DNA, 16 bp, Homo sapiens
ctataataaacttact

SEQ ID NO: 8844 - DNA, 16 bp, Homo sapiens
tgagagttatttacac

SEQ ID NO: 8845 - DNA, 20 bp, Homo sapiens
aggccgtgtgcgtgctgaag

SEQ ID NO: 8846 - DNA, 16 bp, Homo sapiens
atggcaaagtaaccct

SEQ ID NO: 8847 - DNA, 16 bp, Homo sapiens
tcattcccgcatgtca

SEQ ID NO: 8848 - DNA, 15 bp, Homo sapiens
ctgggtgctatagtc

SEQ ID NO: 8849 - DNA, 16 bp, Homo sapiens
ggtatgctgtctcttc

SEQ ID NO: 8850 - DNA, 14 bp, Homo sapiens
ggccaagctgcgtg

SEQ ID NO: 8851 - DNA, 20 bp, Homo sapiens
tgacttgggcaaaggtggaa

SEQ ID NO: 8852 - DNA, 12 bp, Homo sapiens
gtgtgaagtccc

SEQ ID NO: 8853 - DNA, 16 bp, Homo sapiens
tatccgcccagccgag

SEQ ID NO: 8854 - DNA, 16 bp, Homo sapiens
catcatctgtatagcc

SEQ ID NO: 8855 - DNA, 13 bp, Homo sapiens
tccagaggctagc

SEQ ID NO: 8856 - DNA, 18 bp, Homo sapiens
ctcaacaacttctctgtg

SEQ ID NO: 8857 - DNA, 16 bp, Homo sapiens
aacaagatcatcctac

SEQ ID NO: 8858 - DNA, 16 bp, Homo sapiens
tctgtatccagtagga

SEQ ID NO: 8859 - DNA, 16 bp, Homo sapiens
catggacatgaatgtt

SEQ ID NO: 8860 - DNA, 16 bp, Homo sapiens
actgttcggaataaca

SEQ ID NO: 8861 - DNA, 16 bp, Homo sapiens
tgccgagtcactgtcc

SEQ ID NO: 8862 - DNA, 24 bp, Homo sapiens
aaaagaaaacattcacaaaatggg

SEQ ID NO: 8863 - DNA, 20 bp, Homo sapiens
ttagaggaaggctgaactct

SEQ ID NO: 8864 - DNA, 14 bp, Homo sapiens
ggatagcgtgttca

SEQ ID NO: 8865 - DNA, 18 bp, Homo sapiens
tgaaggatggatgagtca

SEQ ID NO: 8866 - DNA, 16 bp, Homo sapiens
cctgttaagaatatcc

SEQ ID NO: 8867 - DNA, 16 bp, Homo sapiens
tcaacaagtccatccg

SEQ ID NO: 8868 - DNA, 16 bp, Homo sapiens
ttgccctattcctctc

SEQ ID NO: 8869 - DNA, 16 bp, Homo sapiens
ggtgaggagccgtcct

SEQ ID NO: 8870 - DNA, 16 bp, Homo sapiens
tcaacttcccattagc

SEQ ID NO: 8871 - DNA, 20 bp, Homo sapiens
cgcttcctggaagtcctgaa

SEQ ID NO: 8872 - DNA, 16 bp, Homo sapiens
tgaggccgagccggga

SEQ ID NO: 8873 - DNA, 16 bp, Homo sapiens
caggattattctgcca

SEQ ID NO: 8874 - DNA, 16 bp, Homo sapiens
aatggaggcattccca

SEQ ID NO: 8875 - DNA, 16 bp, Homo sapiens
cttcgccatcttcaac

SEQ ID NO: 8876 - DNA, 16 bp, Homo sapiens
tggtacttgtctgtcg

SEQ ID NO: 8877 - DNA, 16 bp, Homo sapiens
gggccgggacttcctt

SEQ ID NO: 8878 - DNA, 16 bp, Homo sapiens
ggaatgccgacttttc

SEQ ID NO: 8879 - DNA, 16 bp, Homo sapiens
caggccttctataagt

SEQ ID NO: 8880 - DNA, 18 bp, Homo sapiens
atccgggccatggagacg

SEQ ID NO: 8881 - DNA, 16 bp, Homo sapiens
aagaccctctatctta

SEQ ID NO: 8882 - DNA, 18 bp, Homo sapiens
agtccaagcggatcaacg

SEQ ID NO: 8883 - DNA, 16 bp, Homo sapiens
agcctgggggggactc

SEQ ID NO: 8884 - DNA, 14 bp, Homo sapiens
atggcatcatgggc

SEQ ID NO: 8885 - DNA, 16 bp, Homo sapiens
gtttatctggctggtt

SEQ ID NO: 8886 - DNA, 16 bp, Homo sapiens
caagatccgtgatgtg

SEQ ID NO: 8887 - DNA, 16 bp, Homo sapiens
gttaatgatattgtgc

SEQ ID NO: 8888 - DNA, 20 bp, Homo sapiens
aacaccttcagaaccggagg

SEQ ID NO: 8889 - DNA, 14 bp, Homo sapiens
agtcgcctgtcacc

SEQ ID NO: 8890 - DNA, 20 bp, Homo sapiens
aggcgcggaggtctggccta

SEQ ID NO: 8891 - DNA, 16 bp, Homo sapiens
tgacctcacaggggct

SEQ ID NO: 8892 - DNA, 16 bp, Homo sapiens
acggtgtgtcctggag

SEQ ID NO: 8893 - DNA, 16 bp, Homo sapiens
agcagtccctctgttg

SEQ ID NO: 8894 - DNA, 20 bp, Homo sapiens
catcatgatagtaagtacaa

SEQ ID NO: 8895 - DNA, 16 bp, Homo sapiens
ctggagctctccgggg

SEQ ID NO: 8896 - DNA, 16 bp, Homo sapiens
gtggcggggggtcttg

SEQ ID NO: 8897 - DNA, 16 bp, Homo sapiens
tagctgggaataatac

SEQ ID NO: 8898 - DNA, 16 bp, Homo sapiens
gacagctgcatatggc

SEQ ID NO: 8899 - DNA, 16 bp, Homo sapiens
tacatagtccttcccg

SEQ ID NO: 8900 - DNA, 16 bp, Homo sapiens
aacatgcaagatctgt

SEQ ID NO: 8901 - DNA, 16 bp, Homo sapiens
aatgaggggtccagcc

SEQ ID NO: 8902 - DNA, 16 bp, Homo sapiens
acagcagccgatgggc

SEQ ID NO: 8903 - DNA, 16 bp, Homo sapiens
cctacttccttctaag

SEQ ID NO: 8904 - DNA, 16 bp, Homo sapiens
agagctggccacggtc

SEQ ID NO: 8905 - DNA, 16 bp, Homo sapiens
taatcaatacagttag

SEQ ID NO: 8906 - DNA, 12 bp, Homo sapiens
cataccaggacc

SEQ ID NO: 8907 - DNA, 16 bp, Homo sapiens
ataatagcacttcttt

SEQ ID NO: 8908 - DNA, 16 bp, Homo sapiens
gaggtcagttattggt

SEQ ID NO: 8909 - DNA, 16 bp, Homo sapiens
agaacatcatgtaaac

SEQ ID NO: 8910 - DNA, 16 bp, Homo sapiens
catccgtgcagcactg

SEQ ID NO: 8911 - DNA, 16 bp, Homo sapiens
ttgataggttcataac

SEQ ID NO: 8912 - DNA, 16 bp, Homo sapiens
aattgaaccagataca

SEQ ID NO: 8913 - DNA, 16 bp, Homo sapiens
aaaaaggctgtatgcg

SEQ ID NO: 8914 - DNA, 14 bp, Homo sapiens
tggaggtgtatctc

SEQ ID NO: 8915 - DNA, 16 bp, Homo sapiens
caaaaccacatatctt

SEQ ID NO: 8916 - DNA, 20 bp, Homo sapiens
cgatcagttgtcaccattag

SEQ ID NO: 8917 - DNA, 14 bp, Homo sapiens
gccttaacctattc

SEQ ID NO: 8918 - DNA, 16 bp, Homo sapiens
agggatgtctgtagtg

SEQ ID NO: 8919 - DNA, 18 bp, Homo sapiens
gaacaagcgtcggagggg

SEQ ID NO: 8920 - DNA, 16 bp, Homo sapiens
ccagtgggctcggtag

SEQ ID NO: 8921 - DNA, 16 bp, Homo sapiens
gctgttactatactga

SEQ ID NO: 8922 - DNA, 16 bp, Homo sapiens
tcagcctgagttttac

SEQ ID NO: 8923 - DNA, 19 bp, Homo sapiens
atctgttatcctgctagct

SEQ ID NO: 8924 - DNA, 16 bp, Homo sapiens
ttcgagcctttaatgt

SEQ ID NO: 8925 - DNA, 16 bp, Homo sapiens
tttaggatcagtgact

SEQ ID NO: 8926 - DNA, 16 bp, Homo sapiens
gggaaaacagtccaaa

SEQ ID NO: 8927 - DNA, 19 bp, Homo sapiens
tgtgactgctgacaaagat

SEQ ID NO: 8928 - DNA, 16 bp, Homo sapiens
acagcaatgtctggcc

SEQ ID NO: 8929 - DNA, 16 bp, Homo sapiens
atctcgtggtctcaga

SEQ ID NO: 8930 - DNA, 20 bp, Homo sapiens
gggaacatgctaaatacaaa

SEQ ID NO: 8931 - DNA, 20 bp, Homo sapiens
gagctggacttggagacact

SEQ ID NO: 8932 - DNA, 16 bp, Homo sapiens
aggcattgctataatc

SEQ ID NO: 8933 - DNA, 16 bp, Homo sapiens
acctcctaaaatccct

SEQ ID NO: 8934 - DNA, 16 bp, Homo sapiens
tggagacctgaataat

SEQ ID NO: 8935 - DNA, 22 bp, Homo sapiens
ggaaaagagcagcaactaaaag

SEQ ID NO: 8936 - DNA, 20 bp, Homo sapiens
aagcaaagacatgtccacag

SEQ ID NO: 8937 - DNA, 25 bp, Homo sapiens
tcagaatcagtgggatgaagtacaa

SEQ ID NO: 8938 - DNA, 15 bp, Homo sapiens
ccaagtcagcatccc

SEQ ID NO: 8939 - DNA, 16 bp, Homo sapiens
aatactacttgttaag

SEQ ID NO: 8940 - DNA, 16 bp, Homo sapiens
tagatatagttaatcg

SEQ ID NO: 8941 - DNA, 14 bp, Homo sapiens
cagtgcaggatcag

SEQ ID NO: 8942 - DNA, 16 bp, Homo sapiens
cctatcatgctgacag

SEQ ID NO: 8943 - DNA, 16 bp, Homo sapiens
agctagggtagcggtg

SEQ ID NO: 8944 - DNA, 16 bp, Homo sapiens
ctgcagtggaatagcc

SEQ ID NO: 8945 - DNA, 23 bp, Homo sapiens
tatgccacctgatgatcagatgg

SEQ ID NO: 8946 - DNA, 16 bp, Homo sapiens
atcaacaagtccatcc

SEQ ID NO: 8947 - DNA, 16 bp, Homo sapiens
gactctaccaaggtct

SEQ ID NO: 8948 - DNA, 16 bp, Homo sapiens
ggccactaggctggcg

SEQ ID NO: 8949 - DNA, 20 bp, Homo sapiens
tgggatttgggctaccctaa

SEQ ID NO: 8950 - DNA, 16 bp, Homo sapiens
ggcattgctataatcc

SEQ ID NO: 8951 - DNA, 20 bp, Homo sapiens
cccttggatgtagtctgagg

SEQ ID NO: 8952 - DNA, 16 bp, Homo sapiens
agagtgcttttatgct

SEQ ID NO: 8953 - DNA, 16 bp, Homo sapiens
cactgcattaatatgt

SEQ ID NO: 8954 - DNA, 16 bp, Homo sapiens
aacaaggaggtgcagg

SEQ ID NO: 8955 - DNA, 16 bp, Homo sapiens
acaaccgactatcaac

SEQ ID NO: 8956 - DNA, 16 bp, Homo sapiens
gtccggaagcctggtt

SEQ ID NO: 8957 - DNA, 16 bp, Homo sapiens
gatggtatagatgatg

SEQ ID NO: 8958 - DNA, 16 bp, Homo sapiens
gattcctgttcccgtg

SEQ ID NO: 8959 - DNA, 18 bp, Homo sapiens
accattaatttgcctaac

SEQ ID NO: 8960 - DNA, 16 bp, Homo sapiens
cactctcaccatggag

SEQ ID NO: 8961 - DNA, 20 bp, Homo sapiens
tgcagctactacatcacttt

SEQ ID NO: 8962 - DNA, 12 bp, Homo sapiens
tgcaggatcagt

SEQ ID NO: 8963 - DNA, 12 bp, Homo sapiens
tgcagtttcagg

SEQ ID NO: 8964 - DNA, 16 bp, Homo sapiens
aagatacagagcggtt

SEQ ID NO: 8965 - DNA, 20 bp, Homo sapiens
aaaaaccctgtatggcactt

SEQ ID NO: 8966 - DNA, 16 bp, Homo sapiens
agctcagttcctaccc

SEQ ID NO: 8967 - DNA, 16 bp, Homo sapiens
tgggtaatacattccc

SEQ ID NO: 8968 - DNA, 16 bp, Homo sapiens
atttgctgcttaagct

SEQ ID NO: 8969 - DNA, 20 bp, Homo sapiens
ggtttccgttgcagtcctcg

SEQ ID NO: 8970 - DNA, 16 bp, Homo sapiens
ccgttcccacatccag

SEQ ID NO: 8971 - DNA, 16 bp, Homo sapiens
tggtgatatgattgtc

SEQ ID NO: 8972 - DNA, 16 bp, Homo sapiens
tcgaatagtaatttac

SEQ ID NO: 8973 - DNA, 18 bp, Homo sapiens
gcggggtagggaagaaaa

SEQ ID NO: 8974 - DNA, 16 bp, Homo sapiens
ttcgcaccctctgtgt

SEQ ID NO: 8975 - DNA, 16 bp, Homo sapiens
cagctccatcggccag

SEQ ID NO: 8976 - DNA, 15 bp, Homo sapiens
catcaaatccagagg

SEQ ID NO: 8977 - DNA, 12 bp, Homo sapiens
ctgtctggctga

SEQ ID NO: 8978 - DNA, 20 bp, Homo sapiens
cacagagggtgatggtgggt

SEQ ID NO: 8979 - DNA, 16 bp, Homo sapiens
ccagggatgcttcccg

SEQ ID NO: 8980 - DNA, 16 bp, Homo sapiens
ttgaaccagatacatt

SEQ ID NO: 8981 - DNA, 16 bp, Homo sapiens
caggagatatatgttg

SEQ ID NO: 8982 - DNA, 16 bp, Homo sapiens
accagatcaaggacat

SEQ ID NO: 8983 - DNA, 16 bp, Homo sapiens
aggaccgggcttttca

SEQ ID NO: 8984 - DNA, 19 bp, Homo sapiens
tgtgcgtgctgaagggcga

SEQ ID NO: 8985 - DNA, 16 bp, Homo sapiens
cgctcgtcctagagcc

SEQ ID NO: 8986 - DNA, 16 bp, Homo sapiens
gagtggtgggctcatg

SEQ ID NO: 8987 - DNA, 15 bp, Homo sapiens
agtccacaggtatat

SEQ ID NO: 8988 - DNA, 16 bp, Homo sapiens
cgcaaaatttctgcct

SEQ ID NO: 8989 - DNA, 16 bp, Homo sapiens
cgtgttcccttgttct

SEQ ID NO: 8990 - DNA, 16 bp, Homo sapiens
cggtggttattattat

SEQ ID NO: 8991 - DNA, 25 bp, Homo sapiens
ttgggcagcggcaaactgttgtcag

SEQ ID NO: 8992 - DNA, 18 bp, Homo sapiens
ctgagcgatgaggtgaag

SEQ ID NO: 8993 - DNA, 18 bp, Homo sapiens
cgctcaagatcctctaca

SEQ ID NO: 8994 - DNA, 16 bp, Homo sapiens
ttggtccacaattcaa

SEQ ID NO: 8995 - DNA, 16 bp, Homo sapiens
gcggggagcaacggct

SEQ ID NO: 8996 - DNA, 16 bp, Homo sapiens
catagtccttcccggc

SEQ ID NO: 8997 - DNA, 16 bp, Homo sapiens
tcagtgttgaatagct

SEQ ID NO: 8998 - DNA, 16 bp, Homo sapiens
ctcctgttctatagca

SEQ ID NO: 8999 - DNA, 16 bp, Homo sapiens
gtactctttagccacc

SEQ ID NO: 9000 - DNA, 16 bp, Homo sapiens
aggagatcgcttaaac

SEQ ID NO: 9001 - DNA, 16 bp, Homo sapiens
gcaacaacaaatttga

SEQ ID NO: 9002 - DNA, 16 bp, Homo sapiens
tccagctgcgttttta

SEQ ID NO: 9003 - DNA, 20 bp, Homo sapiens
cgaattatttttaagaagat

SEQ ID NO: 9004 - DNA, 16 bp, Homo sapiens
gaatgattgtagtgct

SEQ ID NO: 9005 - DNA, 16 bp, Homo sapiens
ccctataataaactta

SEQ ID NO: 9006 - DNA, 20 bp, Homo sapiens
cactgtccatgtcacacctt

SEQ ID NO: 9007 - DNA, 16 bp, Homo sapiens
tgacagtgataactga

SEQ ID NO: 9008 - DNA, 16 bp, Homo sapiens
accctgtgaataaata

SEQ ID NO: 9009 - DNA, 16 bp, Homo sapiens
tgagatatttataggg

SEQ ID NO: 9010 - DNA, 16 bp, Homo sapiens
cagaaaggtatatcgc

SEQ ID NO: 9011 - DNA, 16 bp, Homo sapiens
tcgagcctttaatgta

SEQ ID NO: 9012 - DNA, 16 bp, Homo sapiens
caaactctgctttaca

SEQ ID NO: 9013 - DNA, 16 bp, Homo sapiens
agtacagactttcttc

SEQ ID NO: 9014 - DNA, 16 bp, Homo sapiens
ctcctcgctcagtttg

SEQ ID NO: 9015 - DNA, 16 bp, Homo sapiens
agccctacagttggag

SEQ ID NO: 9016 - DNA, 15 bp, Homo sapiens
tgcctaacagacatt

SEQ ID NO: 9017 - DNA, 16 bp, Homo sapiens
ggagatcgcttaaacc

SEQ ID NO: 9018 - DNA, 20 bp, Homo sapiens
tccaacatggtggtgaagtc

SEQ ID NO: 9019 - DNA, 17 bp, Homo sapiens
tcataaagtctagaaaa

SEQ ID NO: 9020 - DNA, 16 bp, Homo sapiens
agatccgtgatgtgga

SEQ ID NO: 9021 - DNA, 20 bp, Homo sapiens
ctacaacaaagctcaggtcg

SEQ ID NO: 9022 - DNA, 16 bp, Homo sapiens
gcagatcgagctggcc

SEQ ID NO: 9023 - DNA, 20 bp, Homo sapiens
acttgggcaaaggtggaaat

SEQ ID NO: 9024 - DNA, 16 bp, Homo sapiens
ccctagagatattagg

SEQ ID NO: 9025 - DNA, 16 bp, Homo sapiens
ggcctcatccatttgt

SEQ ID NO: 9026 - DNA, 16 bp, Homo sapiens
cctggcgtactaatga

SEQ ID NO: 9027 - DNA, 16 bp, Homo sapiens
acagactgtagtccat

SEQ ID NO: 9028 - DNA, 15 bp, Homo sapiens
cagtgtggttgcctt

SEQ ID NO: 9029 - DNA, 16 bp, Homo sapiens
atctgaatttttcgtc

SEQ ID NO: 9030 - DNA, 16 bp, Homo sapiens
ccggatgacttaatct

SEQ ID NO: 9031 - DNA, 16 bp, Homo sapiens
agatcaaggacatgat

SEQ ID NO: 9032 - DNA, 16 bp, Homo sapiens
taactatgcactgttt

SEQ ID NO: 9033 - DNA, 25 bp, Homo sapiens
tatcttacaggaactccaggatggc

SEQ ID NO: 9034 - DNA, 16 bp, Homo sapiens
gtgtattgaattatcc

SEQ ID NO: 9035 - DNA, 18 bp, Homo sapiens
atttctactcttctggac

SEQ ID NO: 9036 - DNA, 16 bp, Homo sapiens
accatgatgggttcct

SEQ ID NO: 9037 - DNA, 16 bp, Homo sapiens
ggtcttgggggcctct

SEQ ID NO: 9038 - DNA, 16 bp, Homo sapiens
ggggggactctaccaa

SEQ ID NO: 9039 - DNA, 14 bp, Homo sapiens
ctgtgtgcacactg

SEQ ID NO: 9040 - DNA, 16 bp, Homo sapiens
ggcagaggggggacca

SEQ ID NO: 9041 - DNA, 16 bp, Homo sapiens
gcctgcactctgtatt

SEQ ID NO: 9042 - DNA, 14 bp, Homo sapiens
gatgtacagccagt

SEQ ID NO: 9043 - DNA, 12 bp, Homo sapiens
tgatttgcataa

SEQ ID NO: 9044 - DNA, 16 bp, Homo sapiens
cggcccttttaaatac

SEQ ID NO: 9045 - DNA, 16 bp, Homo sapiens
gacatccgtgcagcac

SEQ ID NO: 9046 - DNA, 16 bp, Homo sapiens
tgcaagccttctgcgt

SEQ ID NO: 9047 - DNA, 16 bp, Homo sapiens
ggagatcctggtgatc

SEQ ID NO: 9048 - DNA, 16 bp, Homo sapiens
ctctcaaaaacccaca

SEQ ID NO: 9049 - DNA, 16 bp, Homo sapiens
gatcaggtggacactc

SEQ ID NO: 9050 - DNA, 16 bp, Homo sapiens
ccacggtcataaaaaa

SEQ ID NO: 9051 - DNA, 16 bp, Homo sapiens
tctgctgatcgacatt

SEQ ID NO: 9052 - DNA, 16 bp, Homo sapiens
cgagaagctcagttcc

SEQ ID NO: 9053 - DNA, 18 bp, Homo sapiens
gcactcggagaagaacgt

SEQ ID NO: 9054 - DNA, 16 bp, Homo sapiens
gcctggcctatcgttc

SEQ ID NO: 9055 - DNA, 12 bp, Homo sapiens
gaggagatcgac

SEQ ID NO: 9056 - DNA, 16 bp, Homo sapiens
gccttcatccaccacg

SEQ ID NO: 9057 - DNA, 16 bp, Homo sapiens
atactattcagtggat

SEQ ID NO: 9058 - DNA, 19 bp, Homo sapiens
taattgggatcgcccaata

SEQ ID NO: 9059 - DNA, 16 bp, Homo sapiens
gatgtcctcctaggtt

SEQ ID NO: 9060 - DNA, 16 bp, Homo sapiens
atagcacttctttccc

SEQ ID NO: 9061 - DNA, 16 bp, Homo sapiens
aagctcagttcctacc

SEQ ID NO: 9062 - DNA, 16 bp, Homo sapiens
tcacataccataatac

SEQ ID NO: 9063 - DNA, 16 bp, Homo sapiens
aaaagcaggtcgtcaa

SEQ ID NO: 9064 - DNA, 16 bp, Homo sapiens
gctggccgtgaaaacc

SEQ ID NO: 9065 - DNA, 16 bp, Homo sapiens
tcagcatatcttctca

SEQ ID NO: 9066 - DNA, 16 bp, Homo sapiens
cccggacaaagtgctg

SEQ ID NO: 9067 - DNA, 16 bp, Homo sapiens
ggtgatgacaatttat

SEQ ID NO: 9068 - DNA, 16 bp, Homo sapiens
cgtgttccacatgtgt

SEQ ID NO: 9069 - DNA, 16 bp, Homo sapiens
tgaaccctgtctgttc

SEQ ID NO: 9070 - DNA, 16 bp, Homo sapiens
cggccttagtttcttt

SEQ ID NO: 9071 - DNA, 16 bp, Homo sapiens
cttcccattagcagga

SEQ ID NO: 9072 - DNA, 16 bp, Homo sapiens
gctggagaacccgctg

SEQ ID NO: 9073 - DNA, 16 bp, Homo sapiens
cccagccaaatatcct

SEQ ID NO: 9074 - DNA, 12 bp, Homo sapiens
tcatgttgcagc

SEQ ID NO: 9075 - DNA, 16 bp, Homo sapiens
gaggttgtccttaata

SEQ ID NO: 9076 - DNA, 16 bp, Homo sapiens
tgacactcacctgccg

SEQ ID NO: 9077 - DNA, 16 bp, Homo sapiens
cctatactcctcggca

SEQ ID NO: 9078 - DNA, 12 bp, Homo sapiens
tgtcatgtatat

SEQ ID NO: 9079 - DNA, 16 bp, Homo sapiens
agcctccttctcggcg

SEQ ID NO: 9080 - DNA, 16 bp, Homo sapiens
ctgcgaacctctctga

SEQ ID NO: 9081 - DNA, 16 bp, Homo sapiens
gacaaattgcatcttg

SEQ ID NO: 9082 - DNA, 16 bp, Homo sapiens
ggccatctagatatct

SEQ ID NO: 9083 - DNA, 20 bp, Homo sapiens
ccaagcgggcctacagagag

SEQ ID NO: 9084 - DNA, 16 bp, Homo sapiens
tattcagagtcttgat

SEQ ID NO: 9085 - DNA, 14 bp, Homo sapiens
gctgcccacgtggc

SEQ ID NO: 9086 - DNA, 16 bp, Homo sapiens
agctaatcaatacagt

SEQ ID NO: 9087 - DNA, 16 bp, Homo sapiens
cctttgtagtcaacct

SEQ ID NO: 9088 - DNA, 12 bp, Homo sapiens
atgtacagccag

SEQ ID NO: 9089 - DNA, 12 bp, Homo sapiens
cccttttgacca

SEQ ID NO: 9090 - DNA, 16 bp, Homo sapiens
gtgggcatggatatga

SEQ ID NO: 9091 - DNA, 16 bp, Homo sapiens
gcaaaatcggataagt

SEQ ID NO: 9092 - DNA, 16 bp, Homo sapiens
actggaaggcatgttg

SEQ ID NO: 9093 - DNA, 15 bp, Homo sapiens
ttcttctgtttgttc

SEQ ID NO: 9094 - DNA, 18 bp, Homo sapiens
gaggcagccgttcggagg

SEQ ID NO: 9095 - DNA, 16 bp, Homo sapiens
gcggggggtcttgggg

SEQ ID NO: 9096 - DNA, 16 bp, Homo sapiens
aaggaactcatcatta

SEQ ID NO: 9097 - DNA, 16 bp, Homo sapiens
aggagaacaccttctc

SEQ ID NO: 9098 - DNA, 16 bp, Homo sapiens
ctctagctcattgcct

SEQ ID NO: 9099 - DNA, 20 bp, Homo sapiens
gtcctggccctgctgaactt

SEQ ID NO: 9100 - DNA, 16 bp, Homo sapiens
gaacggccacattcgc

SEQ ID NO: 9101 - DNA, 21 bp, Homo sapiens
aaagggacgaactggtgtaat

SEQ ID NO: 9102 - DNA, 12 bp, Homo sapiens
ccattacaagat

SEQ ID NO: 9103 - DNA, 14 bp, Homo sapiens
tggaacctggagcg

SEQ ID NO: 9104 - DNA, 16 bp, Homo sapiens
gctaatcaatacagtt

SEQ ID NO: 9105 - DNA, 16 bp, Homo sapiens
gatctcctgggtatgg

SEQ ID NO: 9106 - DNA, 15 bp, Homo sapiens
taatttgcctaacag

SEQ ID NO: 9107 - DNA, 20 bp, Homo sapiens
ctggaccaggccacctgagc

SEQ ID NO: 9108 - DNA, 16 bp, Homo sapiens
gaagtcgtccctgagg

SEQ ID NO: 9109 - DNA, 16 bp, Homo sapiens
gtgctgagcatatggt

SEQ ID NO: 9110 - DNA, 16 bp, Homo sapiens
tggggcgaatgttctc

SEQ ID NO: 9111 - DNA, 16 bp, Homo sapiens
cggcctctctctgagg

SEQ ID NO: 9112 - DNA, 18 bp, Homo sapiens
ccagcagggatgttcagc

SEQ ID NO: 9113 - DNA, 16 bp, Homo sapiens
tgggccctctagagcc

SEQ ID NO: 9114 - DNA, 14 bp, Homo sapiens
acaccaaagtaact

SEQ ID NO: 9115 - DNA, 16 bp, Homo sapiens
taggtgcccacttggt

SEQ ID NO: 9116 - DNA, 16 bp, Homo sapiens
tcagatcccatctcgg

SEQ ID NO: 9117 - DNA, 14 bp, Homo sapiens
cctgcacaacctgc

SEQ ID NO: 9118 - DNA, 16 bp, Homo sapiens
gctgtgtcctaatgat

SEQ ID NO: 9119 - DNA, 20 bp, Homo sapiens
tgaggctattaaaagaatcc

SEQ ID NO: 9120 - DNA, 16 bp, Homo sapiens
ccaaccttagaaagca

SEQ ID NO: 9121 - DNA, 16 bp, Homo sapiens
cagcttgtgcttgcct

SEQ ID NO: 9122 - DNA, 16 bp, Homo sapiens
tcaagatccgtgatgt

SEQ ID NO: 9123 - DNA, 16 bp, Homo sapiens
cctgagcaagttacca

SEQ ID NO: 9124 - DNA, 16 bp, Homo sapiens
gctgtgttatcatccc

SEQ ID NO: 9125 - DNA, 18 bp, Homo sapiens
ggctaacagaagctgaac

SEQ ID NO: 9126 - DNA, 16 bp, Homo sapiens
tactcttctgttgaac

SEQ ID NO: 9127 - DNA, 16 bp, Homo sapiens
gctgagcccatgtgcc

SEQ ID NO: 9128 - DNA, 22 bp, Homo sapiens
gatttctaccactccaaacgcc

SEQ ID NO: 9129 - DNA, 26 bp, Homo sapiens
gaaactgccatctccaaactagaaat

SEQ ID NO: 9130 - DNA, 18 bp, Homo sapiens
tgacctagctcctggact

SEQ ID NO: 9131 - DNA, 16 bp, Homo sapiens
gtcttcacccaatgat

SEQ ID NO: 9132 - DNA, 16 bp, Homo sapiens
gctcagtttgaccact

SEQ ID NO: 9133 - DNA, 14 bp, Homo sapiens
gtttcacaagatga

SEQ ID NO: 9134 - DNA, 16 bp, Homo sapiens
gtgccgctcctctagc

SEQ ID NO: 9135 - DNA, 16 bp, Homo sapiens
tcgagacccatttgtc

SEQ ID NO: 9136 - DNA, 16 bp, Homo sapiens
cctcaagcattcggcc

SEQ ID NO: 9137 - DNA, 16 bp, Homo sapiens
gatgtctgtagtgaac

SEQ ID NO: 9138 - DNA, 16 bp, Homo sapiens
cacaagctcctttgaa

SEQ ID NO: 9139 - DNA, 16 bp, Homo sapiens
ctcgggtcgggtgtcg

SEQ ID NO: 9140 - DNA, 18 bp, Homo sapiens
tcaacacaatggctggaa

SEQ ID NO: 9141 - DNA, 18 bp, Homo sapiens
tgagagaagccacgctgt

SEQ ID NO: 9142 - DNA, 16 bp, Homo sapiens
gtagtgatcagtgttc

SEQ ID NO: 9143 - DNA, 16 bp, Homo sapiens
gtctgaaatgtgtcga

SEQ ID NO: 9144 - DNA, 16 bp, Homo sapiens
ttgcagctccctaggg

SEQ ID NO: 9145 - DNA, 16 bp, Homo sapiens
atatagtgggatttgt

SEQ ID NO: 9146 - DNA, 16 bp, Homo sapiens
agctggcctctactgt

SEQ ID NO: 9147 - DNA, 16 bp, Homo sapiens
tcaacctctcaaaaac

SEQ ID NO: 9148 - DNA, 16 bp, Homo sapiens
taaaagttccattcac

SEQ ID NO: 9149 - DNA, 12 bp, Homo sapiens
ccaaccgatact

SEQ ID NO: 9150 - DNA, 16 bp, Homo sapiens
cgtttcttgcttaatt

SEQ ID NO: 9151 - DNA, 20 bp, Homo sapiens
atcaagaagaagagggtgga

SEQ ID NO: 9152 - DNA, 20 bp, Homo sapiens
tagctttgcagaatgctcag

SEQ ID NO: 9153 - DNA, 16 bp, Homo sapiens
taggtgttgttcgttc

SEQ ID NO: 9154 - DNA, 16 bp, Homo sapiens
tcgtcctagagccagg

SEQ ID NO: 9155 - DNA, 20 bp, Homo sapiens
tacatgggattaactcagtt

SEQ ID NO: 9156 - DNA, 16 bp, Homo sapiens
gggagacagtaagttc

SEQ ID NO: 9157 - DNA, 18 bp, Homo sapiens
aggagcccgttcggtctg

SEQ ID NO: 9158 - DNA, 16 bp, Homo sapiens
ggggagctcatcttga

SEQ ID NO: 9159 - DNA, 16 bp, Homo sapiens
agcaaggacatcttcc

SEQ ID NO: 9160 - DNA, 16 bp, Homo sapiens
tcctaggcattgtagc

SEQ ID NO: 9161 - DNA, 16 bp, Homo sapiens
ggcttgtctcctaatc

SEQ ID NO: 9162 - DNA, 16 bp, Homo sapiens
gggtgtctatctgcgt

SEQ ID NO: 9163 - DNA, 16 bp, Homo sapiens
gggaagttcactaggg

SEQ ID NO: 9164 - DNA, 18 bp, Homo sapiens
gcccggcgcgagctcaag

SEQ ID NO: 9165 - DNA, 18 bp, Homo sapiens
aaatccagaggctagcag

SEQ ID NO: 9166 - DNA, 16 bp, Homo sapiens
ggcctacctatactcc

SEQ ID NO: 9167 - DNA, 16 bp, Homo sapiens
tccagtcaatatccgg

SEQ ID NO: 9168 - DNA, 16 bp, Homo sapiens
ttctccctatatgata

SEQ ID NO: 9169 - DNA, 16 bp, Homo sapiens
cccaagattgatttag

SEQ ID NO: 9170 - DNA, 16 bp, Homo sapiens
ccggacttggcattcg

SEQ ID NO: 9171 - DNA, 16 bp, Homo sapiens
tagctcttccctattg

SEQ ID NO: 9172 - DNA, 16 bp, Homo sapiens
gctgcatccataagtt

SEQ ID NO: 9173 - DNA, 18 bp, Homo sapiens
gagcggaggaagtggatc

SEQ ID NO: 9174 - DNA, 16 bp, Homo sapiens
tgtgccgagaagctca

SEQ ID NO: 9175 - DNA, 16 bp, Homo sapiens
cactgaccgtttctgg

SEQ ID NO: 9176 - DNA, 15 bp, Homo sapiens
ataaagtctagaaaa

SEQ ID NO: 9177 - DNA, 16 bp, Homo sapiens
agaagctcagttccta

SEQ ID NO: 9178 - DNA, 16 bp, Homo sapiens
aatatccttcctagct

SEQ ID NO: 9179 - DNA, 16 bp, Homo sapiens
tccatccgcgacctca

SEQ ID NO: 9180 - DNA, 16 bp, Homo sapiens
ctgtaagtgcctgcac

SEQ ID NO: 9181 - DNA, 16 bp, Homo sapiens
cagacagccactggtg

SEQ ID NO: 9182 - DNA, 16 bp, Homo sapiens
agttataatagcactt

SEQ ID NO: 9183 - DNA, 18 bp, Homo sapiens
caaatccagaggctagca

SEQ ID NO: 9184 - DNA, 18 bp, Homo sapiens
cagcctgggaacttcagc

SEQ ID NO: 9185 - DNA, 12 bp, Homo sapiens
acctggtgtaga

SEQ ID NO: 9186 - DNA, 16 bp, Homo sapiens
tggcacctacctgcgg

SEQ ID NO: 9187 - DNA, 16 bp, Homo sapiens
acccggcctattatga

SEQ ID NO: 9188 - DNA, 12 bp, Homo sapiens
tagcagttcaac

SEQ ID NO: 9189 - DNA, 16 bp, Homo sapiens
ccgcgacctcatgcca

SEQ ID NO: 9190 - DNA, 15 bp, Homo sapiens
cagaaccggaggcaa

SEQ ID NO: 9191 - DNA, 12 bp, Homo sapiens
tgtggttgccac

SEQ ID NO: 9192 - DNA, 16 bp, Homo sapiens
tgctcagaccgtagct

SEQ ID NO: 9193 - DNA, 16 bp, Homo sapiens
aaccagtcttctgtaa

SEQ ID NO: 9194 - DNA, 15 bp, Homo sapiens
ctgagtacacagtca

SEQ ID NO: 9195 - DNA, 16 bp, Homo sapiens
aacatgcgtgagtgtg

SEQ ID NO: 9196 - DNA, 16 bp, Homo sapiens
ggccggccttgcccta

SEQ ID NO: 9197 - DNA, 16 bp, Homo sapiens
tatcaccaaggtgcct

SEQ ID NO: 9198 - DNA, 16 bp, Homo sapiens
aaggagttcctatcga

SEQ ID NO: 9199 - DNA, 25 bp, Homo sapiens
aagaacaccttcagaaccggaggca

SEQ ID NO: 9200 - DNA, 20 bp, Homo sapiens
ctgacaagccacctgaggag

SEQ ID NO: 9201 - DNA, 20 bp, Homo sapiens
ctgcaggcgatttgacagat

SEQ ID NO: 9202 - DNA, 16 bp, Homo sapiens
agggagttacatgtct

SEQ ID NO: 9203 - DNA, 16 bp, Homo sapiens
ccatggccgctgtagg

SEQ ID NO: 9204 - DNA, 18 bp, Homo sapiens
gccaggatgttactagca

SEQ ID NO: 9205 - DNA, 16 bp, Homo sapiens
gtcggctgtccttgcc

SEQ ID NO: 9206 - DNA, 16 bp, Homo sapiens
gcatggactaatcaga

SEQ ID NO: 9207 - DNA, 16 bp, Homo sapiens
ccacactgcagaagat

SEQ ID NO: 9208 - DNA, 16 bp, Homo sapiens
ctgctttacactttgc

SEQ ID NO: 9209 - DNA, 16 bp, Homo sapiens
cggggccaggtcgttg

SEQ ID NO: 9210 - DNA, 18 bp, Homo sapiens
tacaggaaggtctccgaa

SEQ ID NO: 9211 - DNA, 16 bp, Homo sapiens
ccctgctaatctgcaa

SEQ ID NO: 9212 - DNA, 16 bp, Homo sapiens
atcaggccatgtgagt

SEQ ID NO: 9213 - DNA, 16 bp, Homo sapiens
tgagcagtcctacatc

SEQ ID NO: 9214 - DNA, 16 bp, Homo sapiens
tgagtccctaatcgtt

SEQ ID NO: 9215 - DNA, 16 bp, Homo sapiens
atggggcggcctgagg

SEQ ID NO: 9216 - DNA, 16 bp, Homo sapiens
taggaaaactaaaacg

SEQ ID NO: 9217 - DNA, 16 bp, Homo sapiens
actgtttacaatgagc

SEQ ID NO: 9218 - DNA, 16 bp, Homo sapiens
atggagtgaatttcac

SEQ ID NO: 9219 - DNA, 16 bp, Homo sapiens
aacaagttgctcccgt

SEQ ID NO: 9220 - DNA, 16 bp, Homo sapiens
accgaggggtgtgcgg

SEQ ID NO: 9221 - DNA, 16 bp, Homo sapiens
gcccagcaatatatct

SEQ ID NO: 9222 - DNA, 16 bp, Homo sapiens
tgccctgggtataagt

SEQ ID NO: 9223 - DNA, 16 bp, Homo sapiens
cgtgtgcccaggccgt

SEQ ID NO: 9224 - DNA, 16 bp, Homo sapiens
tacatgtaggatcttg

SEQ ID NO: 9225 - DNA, 16 bp, Homo sapiens
tgcagtaccactccca

SEQ ID NO: 9226 - DNA, 18 bp, Homo sapiens
cacaaaatgccacgtttc

SEQ ID NO: 9227 - DNA, 16 bp, Homo sapiens
tgaccctgtgctgcaa

SEQ ID NO: 9228 - DNA, 20 bp, Homo sapiens
gttacgttccttcgatcagt

SEQ ID NO: 9229 - DNA, 14 bp, Homo sapiens
atgaagaccctcat

SEQ ID NO: 9230 - DNA, 16 bp, Homo sapiens
actttggggtctgtca

SEQ ID NO: 9231 - DNA, 16 bp, Homo sapiens
ccttggttgccagcat

SEQ ID NO: 9232 - DNA, 14 bp, Homo sapiens
caccctgcgctcca

SEQ ID NO: 9233 - DNA, 16 bp, Homo sapiens
cgatgggccaatgggc

SEQ ID NO: 9234 - DNA, 14 bp, Homo sapiens
cacagctagaactt

SEQ ID NO: 9235 - DNA, 12 bp, Homo sapiens
gtggtggccggt

SEQ ID NO: 9236 - DNA, 15 bp, Homo sapiens
ggaaaaacccatttc

SEQ ID NO: 9237 - DNA, 16 bp, Homo sapiens
ccttacctcaatcaag

SEQ ID NO: 9238 - DNA, 14 bp, Homo sapiens
ctggaaggtaatgg

SEQ ID NO: 9239 - DNA, 16 bp, Homo sapiens
ggctgctcacttggtc

SEQ ID NO: 9240 - DNA, 18 bp, Homo sapiens
aaaggtgaagatatattc

SEQ ID NO: 9241 - DNA, 16 bp, Homo sapiens
cattgagcagtcctac

SEQ ID NO: 9242 - DNA, 20 bp, Homo sapiens
ccacttgaacctggaaaaga

SEQ ID NO: 9243 - DNA, 16 bp, Homo sapiens
gactgcccagattaat

SEQ ID NO: 9244 - DNA, 16 bp, Homo sapiens
tgtctctattgcggtc

SEQ ID NO: 9245 - DNA, 16 bp, Homo sapiens
ccgcggggccaggtcg

SEQ ID NO: 9246 - DNA, 16 bp, Homo sapiens
ggggattcataatatg

SEQ ID NO: 9247 - DNA, 16 bp, Homo sapiens
gggagggggattcata

SEQ ID NO: 9248 - DNA, 20 bp, Homo sapiens
tgcagtcctcggaaccagga

SEQ ID NO: 9249 - DNA, 16 bp, Homo sapiens
atcgacctgtaccaca

SEQ ID NO: 9250 - DNA, 20 bp, Homo sapiens
gaatattgtttctagaacag

SEQ ID NO: 9251 - DNA, 14 bp, Homo sapiens
aaccatacagtgag

SEQ ID NO: 9252 - DNA, 16 bp, Homo sapiens
gctgccagaggtgcct

SEQ ID NO: 9253 - DNA, 16 bp, Homo sapiens
tctctctggtttcgcc

SEQ ID NO: 9254 - DNA, 16 bp, Homo sapiens
acagcctacaaattgg

SEQ ID NO: 9255 - DNA, 18 bp, Homo sapiens
ggacctgaggcaagacga

SEQ ID NO: 9256 - DNA, 16 bp, Homo sapiens
tcaaaattgcttggga

SEQ ID NO: 9257 - DNA, 16 bp, Homo sapiens
gcaggcctatctggtg

SEQ ID NO: 9258 - DNA, 16 bp, Homo sapiens
gtgtaccagtaaggta

SEQ ID NO: 9259 - DNA, 16 bp, Homo sapiens
gtaaagctctctatat

SEQ ID NO: 9260 - DNA, 16 bp, Homo sapiens
ctcctgatcaaatagg

SEQ ID NO: 9261 - DNA, 15 bp, Homo sapiens
agacactgcagagct

SEQ ID NO: 9262 - DNA, 16 bp, Homo sapiens
ctgctcacttggtccc

SEQ ID NO: 9263 - DNA, 16 bp, Homo sapiens
ccttaaacaaattgtc

SEQ ID NO: 9264 - DNA, 14 bp, Homo sapiens
atggggaagtaagg

SEQ ID NO: 9265 - DNA, 20 bp, Homo sapiens
tggaaatgaagaaagtacaa

SEQ ID NO: 9266 - DNA, 25 bp, Homo sapiens
aggaagttagaagatctgagctctg

SEQ ID NO: 9267 - DNA, 20 bp, Homo sapiens
gcctggctacaatactgcac

SEQ ID NO: 9268 - DNA, 12 bp, Homo sapiens
tttgatatgccc

SEQ ID NO: 9269 - DNA, 19 bp, Homo sapiens
ggtcctcactttaatcctc

SEQ ID NO: 9270 - DNA, 16 bp, Homo sapiens
tctcaaaaacccacag

SEQ ID NO: 9271 - DNA, 16 bp, Homo sapiens
agtaagtgttatgggg

SEQ ID NO: 9272 - DNA, 16 bp, Homo sapiens
cgtggcccttctgtaa

SEQ ID NO: 9273 - DNA, 16 bp, Homo sapiens
ccctaccgccttcctg

SEQ ID NO: 9274 - DNA, 16 bp, Homo sapiens
acagtgccatgcatga

SEQ ID NO: 9275 - DNA, 16 bp, Homo sapiens
ttgttccacctatgcg

SEQ ID NO: 9276 - DNA, 16 bp, Homo sapiens
taaaccgtaatttact

SEQ ID NO: 9277 - DNA, 16 bp, Homo sapiens
ccgtgagagttattta

SEQ ID NO: 9278 - DNA, 18 bp, Homo sapiens
ccacttgaacctggaaaa

SEQ ID NO: 9279 - DNA, 16 bp, Homo sapiens
aattgcttgggaaagc

SEQ ID NO: 9280 - DNA, 16 bp, Homo sapiens
cttcaagcaggaactt

SEQ ID NO: 9281 - DNA, 20 bp, Homo sapiens
agaacaccttcagaaccgga

SEQ ID NO: 9282 - DNA, 18 bp, Homo sapiens
ttttcagttccctcctgc

SEQ ID NO: 9283 - DNA, 16 bp, Homo sapiens
gcccgaatcaatcgca

SEQ ID NO: 9284 - DNA, 18 bp, Homo sapiens
tattgtgaaggagggttg

SEQ ID NO: 9285 - DNA, 16 bp, Homo sapiens
tggctggagtaaagcc

SEQ ID NO: 9286 - DNA, 16 bp, Homo sapiens
cctgtccggaagtgca

SEQ ID NO: 9287 - DNA, 21 bp, Homo sapiens
ggaagaaataattcagcaatc

SEQ ID NO: 9288 - DNA, 16 bp, Homo sapiens
cccgtgccatttttct

SEQ ID NO: 9289 - DNA, 16 bp, Homo sapiens
ggaagccactaatgtc

SEQ ID NO: 9290 - DNA, 12 bp, Homo sapiens
gatcaggaaatc

SEQ ID NO: 9291 - DNA, 16 bp, Homo sapiens
aagatctcgcttaagc

SEQ ID NO: 9292 - DNA, 16 bp, Homo sapiens
atcatcaacaagtcca

SEQ ID NO: 9293 - DNA, 16 bp, Homo sapiens
gggagatggtctcttt

SEQ ID NO: 9294 - DNA, 16 bp, Homo sapiens
tgagaaccggatgagg

SEQ ID NO: 9295 - DNA, 16 bp, Homo sapiens
gatcgtctatttccct

SEQ ID NO: 9296 - DNA, 14 bp, Homo sapiens
tactgtttcctcaa

SEQ ID NO: 9297 - DNA, 16 bp, Homo sapiens
gaatcccgaggtgcga

SEQ ID NO: 9298 - DNA, 18 bp, Homo sapiens
gcggcggcggcacctccc

SEQ ID NO: 9299 - DNA, 16 bp, Homo sapiens
agtcagtccagtggca

SEQ ID NO: 9300 - DNA, 16 bp, Homo sapiens
tctcctatgctctgct

SEQ ID NO: 9301 - DNA, 16 bp, Homo sapiens
cctctccaattatccc

SEQ ID NO: 9302 - DNA, 12 bp, Homo sapiens
gacactgaagtt

SEQ ID NO: 9303 - DNA, 16 bp, Homo sapiens
agagatcacagttgga

SEQ ID NO: 9304 - DNA, 16 bp, Homo sapiens
gacccagcctgttgaa

SEQ ID NO: 9305 - DNA, 18 bp, Homo sapiens
gaaagaattcagaatcag

SEQ ID NO: 9306 - DNA, 16 bp, Homo sapiens
gctgatcgacattgag

SEQ ID NO: 9307 - DNA, 16 bp, Homo sapiens
catcactacagtagct

SEQ ID NO: 9308 - DNA, 12 bp, Homo sapiens
gccaatcatcca

SEQ ID NO: 9309 - DNA, 16 bp, Homo sapiens
ttttgcactgcaagtc

SEQ ID NO: 9310 - DNA, 20 bp, Homo sapiens
gtgatctcactctcaggaga

SEQ ID NO: 9311 - DNA, 16 bp, Homo sapiens
cctgcactctgtattc

SEQ ID NO: 9312 - DNA, 16 bp, Homo sapiens
ccagtaaggtattgct

SEQ ID NO: 9313 - DNA, 16 bp, Homo sapiens
caggaatcgtcacccg

SEQ ID NO: 9314 - DNA, 14 bp, Homo sapiens
tggtttaacctcct

SEQ ID NO: 9315 - DNA, 14 bp, Homo sapiens
catcaagaggggca

SEQ ID NO: 9316 - DNA, 19 bp, Homo sapiens
tcgtttggcttgtggtgta

SEQ ID NO: 9317 - DNA, 18 bp, Homo sapiens
ggacaggccagagccaag

SEQ ID NO: 9318 - DNA, 20 bp, Homo sapiens
gaactgattggttaccaccc

SEQ ID NO: 9319 - DNA, 18 bp, Homo sapiens
ctctggctgctgaggaga

SEQ ID NO: 9320 - DNA, 16 bp, Homo sapiens
cctgctcccgttttgt

SEQ ID NO: 9321 - DNA, 20 bp, Homo sapiens
aatgtgtcctcagtggagaa

SEQ ID NO: 9322 - DNA, 20 bp, Homo sapiens
gcttacacacagaaatggcc

SEQ ID NO: 9323 - DNA, 16 bp, Homo sapiens
ccagataaccctgtgg

SEQ ID NO: 9324 - DNA, 16 bp, Homo sapiens
tatgcattgcctgggg

SEQ ID NO: 9325 - DNA, 19 bp, Homo sapiens
cagatgggtattaaacttg

SEQ ID NO: 9326 - DNA, 16 bp, Homo sapiens
cttgtccaggctttta

SEQ ID NO: 9327 - DNA, 16 bp, Homo sapiens
ccacataacagattgg

SEQ ID NO: 9328 - DNA, 16 bp, Homo sapiens
ggatggcaaatactta

SEQ ID NO: 9329 - DNA, 12 bp, Homo sapiens
ccgccaaattta

SEQ ID NO: 9330 - DNA, 16 bp, Homo sapiens
tgctgacagctgcata

SEQ ID NO: 9331 - DNA, 16 bp, Homo sapiens
agccatccctgctcga

SEQ ID NO: 9332 - DNA, 16 bp, Homo sapiens
ggagctatcaaaatgc

SEQ ID NO: 9333 - DNA, 16 bp, Homo sapiens
gccaagaggcttgttc

SEQ ID NO: 9334 - DNA, 16 bp, Homo sapiens
caaagagccgagtttg

SEQ ID NO: 9335 - DNA, 16 bp, Homo sapiens
aggcctgaggtgtaca

SEQ ID NO: 9336 - DNA, 16 bp, Homo sapiens
ccatattaaccacaca

SEQ ID NO: 9337 - DNA, 16 bp, Homo sapiens
tgcagaattaccatta

SEQ ID NO: 9338 - DNA, 16 bp, Homo sapiens
accgtgtccagtatat

SEQ ID NO: 9339 - DNA, 16 bp, Homo sapiens
caacatcagcctgatg

SEQ ID NO: 9340 - DNA, 16 bp, Homo sapiens
gatgaatcatatttgc

SEQ ID NO: 9341 - DNA, 15 bp, Homo sapiens
tcaaatccagaggct

SEQ ID NO: 9342 - DNA, 16 bp, Homo sapiens
ctggaaatccatacat

SEQ ID NO: 9343 - DNA, 16 bp, Homo sapiens
aaaggcttacattgta

SEQ ID NO: 9344 - DNA, 16 bp, Homo sapiens
ctggccaaggaagtcg

SEQ ID NO: 9345 - DNA, 20 bp, Homo sapiens
gtcgctattaacatcctttt

SEQ ID NO: 9346 - DNA, 14 bp, Homo sapiens
tggacttcttcagg

SEQ ID NO: 9347 - DNA, 16 bp, Homo sapiens
caccgtgtccagtata

SEQ ID NO: 9348 - DNA, 20 bp, Homo sapiens
gcgacggcccagtgcagggc

SEQ ID NO: 9349 - DNA, 16 bp, Homo sapiens
ctagcactctttgcct

SEQ ID NO: 9350 - DNA, 16 bp, Homo sapiens
gagatcgtctatttcc

SEQ ID NO: 9351 - DNA, 16 bp, Homo sapiens
ttcctcgtattttacc

SEQ ID NO: 9352 - DNA, 16 bp, Homo sapiens
aaaacagtccaaacag

SEQ ID NO: 9353 - DNA, 16 bp, Homo sapiens
tcatctccgcatttgt

SEQ ID NO: 9354 - DNA, 16 bp, Homo sapiens
gaatcgtcacccggcg

SEQ ID NO: 9355 - DNA, 16 bp, Homo sapiens
acccatatacatgtgg

SEQ ID NO: 9356 - DNA, 16 bp, Homo sapiens
tacaagttataatagc

SEQ ID NO: 9357 - DNA, 16 bp, Homo sapiens
ggagaacaccttctcc

SEQ ID NO: 9358 - DNA, 16 bp, Homo sapiens
ccaccacccaagttag

SEQ ID NO: 9359 - DNA, 16 bp, Homo sapiens
agagcgtgtttgccaa

SEQ ID NO: 9360 - DNA, 16 bp, Homo sapiens
ggtgaaggtagtgccc

SEQ ID NO: 9361 - DNA, 20 bp, Homo sapiens
tgcccatacctccgcagtgc

SEQ ID NO: 9362 - DNA, 16 bp, Homo sapiens
gtaccatgccctcaag

SEQ ID NO: 9363 - DNA, 20 bp, Homo sapiens
atttgagtcctacctgctgc

SEQ ID NO: 9364 - DNA, 16 bp, Homo sapiens
ggggaaaacagtccaa

SEQ ID NO: 9365 - DNA, 16 bp, Homo sapiens
taggtcccatctagct

SEQ ID NO: 9366 - DNA, 16 bp, Homo sapiens
aagtggctacctttcc

SEQ ID NO: 9367 - DNA, 16 bp, Homo sapiens
ggaccaggtgaggagc

SEQ ID NO: 9368 - DNA, 16 bp, Homo sapiens
gtagaaggcataattc

SEQ ID NO: 9369 - DNA, 16 bp, Homo sapiens
tcatgctgacagctgc

SEQ ID NO: 9370 - DNA, 12 bp, Homo sapiens
gcagttggctaa

SEQ ID NO: 9371 - DNA, 25 bp, Homo sapiens
gcaaactgttgtcagaacattgaat

SEQ ID NO: 9372 - DNA, 16 bp, Homo sapiens
ccgtgatgtggagaag

SEQ ID NO: 9373 - DNA, 16 bp, Homo sapiens
gggcagccacttgctg

SEQ ID NO: 9374 - DNA, 16 bp, Homo sapiens
ggggtcccacttgctt

SEQ ID NO: 9375 - DNA, 16 bp, Homo sapiens
aactacttaattgtgc

SEQ ID NO: 9376 - DNA, 16 bp, Homo sapiens
ccatggccaccgggcc

SEQ ID NO: 9377 - DNA, 16 bp, Homo sapiens
gaagtatacatactga

SEQ ID NO: 9378 - DNA, 18 bp, Homo sapiens
cagaaccggaggcaacag

SEQ ID NO: 9379 - DNA, 12 bp, Homo sapiens
cctggtgtagag

SEQ ID NO: 9380 - DNA, 16 bp, Homo sapiens
gatgcttcccgtgctg

SEQ ID NO: 9381 - DNA, 16 bp, Homo sapiens
ccgcactgcgcaaagg

SEQ ID NO: 9382 - DNA, 25 bp, Homo sapiens
agaaccggaggcaacagttgaatga

SEQ ID NO: 9383 - DNA, 16 bp, Homo sapiens
tgaggcggcgaccgtg

SEQ ID NO: 9384 - DNA, 16 bp, Homo sapiens
ggcctcgttcctccga

SEQ ID NO: 9385 - DNA, 20 bp, Homo sapiens
gacttgggcaaaggtggaaa

SEQ ID NO: 9386 - DNA, 16 bp, Homo sapiens
cccacatgtgaatcgt

SEQ ID NO: 9387 - DNA, 16 bp, Homo sapiens
tatttgccgtgtgcca

SEQ ID NO: 9388 - DNA, 16 bp, Homo sapiens
gaggtctggttaagtt

SEQ ID NO: 9389 - DNA, 14 bp, Homo sapiens
tcttcctacactga

SEQ ID NO: 9390 - DNA, 16 bp, Homo sapiens
atccgtgcagcactgg

SEQ ID NO: 9391 - DNA, 19 bp, Homo sapiens
agatctgttgagaaatggc

SEQ ID NO: 9392 - DNA, 16 bp, Homo sapiens
ttgcgagaggagacag

SEQ ID NO: 9393 - DNA, 16 bp, Homo sapiens
acaggaaaatgtgcgt

SEQ ID NO: 9394 - DNA, 16 bp, Homo sapiens
aaaaagcaggtcgtca

SEQ ID NO: 9395 - DNA, 16 bp, Homo sapiens
cccggacttggcattc

SEQ ID NO: 9396 - DNA, 16 bp, Homo sapiens
tgcagggggcttctct

SEQ ID NO: 9397 - DNA, 16 bp, Homo sapiens
atgctctgctccctcc

SEQ ID NO: 9398 - DNA, 18 bp, Homo sapiens
ggaagctaaggaagaagc

SEQ ID NO: 9399 - DNA, 16 bp, Homo sapiens
gtgtttgccaacagtg

SEQ ID NO: 9400 - DNA, 16 bp, Homo sapiens
gagcttcagtggtctg

SEQ ID NO: 9401 - DNA, 16 bp, Homo sapiens
ggtaggcttgctaggt

SEQ ID NO: 9402 - DNA, 16 bp, Homo sapiens
ttttgttttacctgcg

SEQ ID NO: 9403 - DNA, 20 bp, Homo sapiens
acattcacgtatatgatacc

SEQ ID NO: 9404 - DNA, 20 bp, Homo sapiens
ccgtgtgcgtgctgaagggc

SEQ ID NO: 9405 - DNA, 16 bp, Homo sapiens
gccttgtggggtatac

SEQ ID NO: 9406 - DNA, 16 bp, Homo sapiens
cggcctaccggcacat

SEQ ID NO: 9407 - DNA, 20 bp, Homo sapiens
taaaatgtctgtttcaatga

SEQ ID NO: 9408 - DNA, 16 bp, Homo sapiens
ggtctggggccctccg

SEQ ID NO: 9409 - DNA, 16 bp, Homo sapiens
gagaccctatatcctt

SEQ ID NO: 9410 - DNA, 16 bp, Homo sapiens
gcacttctttcccttt

SEQ ID NO: 9411 - DNA, 20 bp, Homo sapiens
tcctggcccatcaactgtat

SEQ ID NO: 9412 - DNA, 16 bp, Homo sapiens
catgccttatatttgc

SEQ ID NO: 9413 - DNA, 16 bp, Homo sapiens
gggctcggtagtgccc

SEQ ID NO: 9414 - DNA, 16 bp, Homo sapiens
cgcactgcgcaaaggg

SEQ ID NO: 9415 - DNA, 20 bp, Homo sapiens
atcacttggaagatttgtat

SEQ ID NO: 9416 - DNA, 16 bp, Homo sapiens
gctccaaagtctggca

SEQ ID NO: 9417 - DNA, 12 bp, Homo sapiens
gccattacccgg

SEQ ID NO: 9418 - DNA, 16 bp, Homo sapiens
cctcatcgacctcccg

SEQ ID NO: 9419 - DNA, 14 bp, Homo sapiens
tagagggcctcttt

SEQ ID NO: 9420 - DNA, 16 bp, Homo sapiens
tgctgtctggctagct

SEQ ID NO: 9421 - DNA, 16 bp, Homo sapiens
ttgctgttgattgaag

SEQ ID NO: 9422 - DNA, 16 bp, Homo sapiens
tcagatctatagagtt

SEQ ID NO: 9423 - DNA, 12 bp, Homo sapiens
gtcgcctgtcac

SEQ ID NO: 9424 - DNA, 20 bp, Homo sapiens
tggctggagacccaggggac

SEQ ID NO: 9425 - DNA, 16 bp, Homo sapiens
cctgagtacttttact

SEQ ID NO: 9426 - DNA, 20 bp, Homo sapiens
gggcttggacagaacttacc

SEQ ID NO: 9427 - DNA, 16 bp, Homo sapiens
cctgcctctagttcac

SEQ ID NO: 9428 - DNA, 16 bp, Homo sapiens
gctcggtagtgcccag

SEQ ID NO: 9429 - DNA, 16 bp, Homo sapiens
cttgaccctcatcgac

SEQ ID NO: 9430 - DNA, 20 bp, Homo sapiens
gcggggaccgattcaccatg

SEQ ID NO: 9431 - DNA, 16 bp, Homo sapiens
agtccttcccggccat

SEQ ID NO: 9432 - DNA, 16 bp, Homo sapiens
tgctgctactattaca

SEQ ID NO: 9433 - DNA, 16 bp, Homo sapiens
cctgaactgtctgttc

SEQ ID NO: 9434 - DNA, 20 bp, Homo sapiens
catccatgtgaccatgagga

SEQ ID NO: 9435 - DNA, 20 bp, Homo sapiens
aaaatgcacctttttattta

SEQ ID NO: 9436 - DNA, 18 bp, Homo sapiens
gtagggaagaaaactatc

SEQ ID NO: 9437 - DNA, 20 bp, Homo sapiens
ggccgctcaatttatgaata

SEQ ID NO: 9438 - DNA, 16 bp, Homo sapiens
agccgttggcccgggc

SEQ ID NO: 9439 - DNA, 12 bp, Homo sapiens
tgacaatgattt

SEQ ID NO: 9440 - DNA, 16 bp, Homo sapiens
ggcagtcaccattgcg

SEQ ID NO: 9441 - DNA, 16 bp, Homo sapiens
gttatcccaatttcat

SEQ ID NO: 9442 - DNA, 20 bp, Homo sapiens
gttgaatcttcagatatgaa

SEQ ID NO: 9443 - DNA, 12 bp, Homo sapiens
gaatgggagtgg

SEQ ID NO: 9444 - DNA, 18 bp, Homo sapiens
gaagttagaagatctgag

SEQ ID NO: 9445 - DNA, 16 bp, Homo sapiens
ggcagatcctttgggc

SEQ ID NO: 9446 - DNA, 16 bp, Homo sapiens
gaggtgcaaataaacc

SEQ ID NO: 9447 - DNA, 14 bp, Homo sapiens
ctctgacacctggg

SEQ ID NO: 9448 - DNA, 20 bp, Homo sapiens
ccttggacacttggttagac

SEQ ID NO: 9449 - DNA, 16 bp, Homo sapiens
tcaacactcagtttgt

SEQ ID NO: 9450 - DNA, 14 bp, Homo sapiens
agcggcaccctcat

SEQ ID NO: 9451 - DNA, 16 bp, Homo sapiens
tcggatgcccgttggc

SEQ ID NO: 9452 - DNA, 20 bp, Homo sapiens
atggaccagtgaaggtgtgg

SEQ ID NO: 9453 - DNA, 16 bp, Homo sapiens
cactgctgagatattg

SEQ ID NO: 9454 - DNA, 18 bp, Homo sapiens
atggcaccttcattggct

SEQ ID NO: 9455 - DNA, 14 bp, Homo sapiens
ttacctccagattc

SEQ ID NO: 9456 - DNA, 20 bp, Homo sapiens
cagcctctctctgtccactt

SEQ ID NO: 9457 - DNA, 16 bp, Homo sapiens
gtccttgccaaaccac

SEQ ID NO: 9458 - DNA, 16 bp, Homo sapiens
gtcaggcaagttccac

SEQ ID NO: 9459 - DNA, 12 bp, Homo sapiens
gactcatgctgg

SEQ ID NO: 9460 - DNA, 12 bp, Homo sapiens
atgtgcagtgtt

SEQ ID NO: 9461 - DNA, 20 bp, Homo sapiens
agagttcttgggagcagcgc

SEQ ID NO: 9462 - DNA, 16 bp, Homo sapiens
gccttctataagtgcg

SEQ ID NO: 9463 - DNA, 14 bp, Homo sapiens
ctgtaagtctgatt

SEQ ID NO: 9464 - DNA, 16 bp, Homo sapiens
cgtgtgggattaagcc

SEQ ID NO: 9465 - DNA, 16 bp, Homo sapiens
acaacatttatcggtg

SEQ ID NO: 9466 - DNA, 16 bp, Homo sapiens
tggccgtggcctctgg

SEQ ID NO: 9467 - DNA, 16 bp, Homo sapiens
gggacttctttttccg

SEQ ID NO: 9468 - DNA, 16 bp, Homo sapiens
ttacttgaaggttgca

SEQ ID NO: 9469 - DNA, 16 bp, Homo sapiens
agtttttctatctgcg

SEQ ID NO: 9470 - DNA, 16 bp, Homo sapiens
aaaggcaccaattgtg

SEQ ID NO: 9471 - DNA, 16 bp, Homo sapiens
cctcaacccattttgt

SEQ ID NO: 9472 - DNA, 18 bp, Homo sapiens
attcaactttagtatttt

SEQ ID NO: 9473 - DNA, 16 bp, Homo sapiens
gctgggctttgtagac

SEQ ID NO: 9474 - DNA, 16 bp, Homo sapiens
tccatggccaccgggc

SEQ ID NO: 9475 - DNA, 16 bp, Homo sapiens
gggtgtatttaatttg

SEQ ID NO: 9476 - DNA, 20 bp, Homo sapiens
cgtgtgcgtgctgaagggcg

SEQ ID NO: 9477 - DNA, 16 bp, Homo sapiens
ccaccgcgcccttaaa

SEQ ID NO: 9478 - DNA, 16 bp, Homo sapiens
tgccagcgacatcatg

SEQ ID NO: 9479 - DNA, 16 bp, Homo sapiens
gctatctggcttagga

SEQ ID NO: 9480 - DNA, 16 bp, Homo sapiens
tgccatcgtggccatg

SEQ ID NO: 9481 - DNA, 18 bp, Homo sapiens
tccgtaacttaggacaaa

SEQ ID NO: 9482 - DNA, 16 bp, Homo sapiens
caaaaaacctctgttg

SEQ ID NO: 9483 - DNA, 16 bp, Homo sapiens
cgtggtctggatggac

SEQ ID NO: 9484 - DNA, 20 bp, Homo sapiens
cgacttgattttctcccttc

SEQ ID NO: 9485 - DNA, 20 bp, Homo sapiens
gctacaatactgcacaaact

SEQ ID NO: 9486 - DNA, 16 bp, Homo sapiens
agcctgctactcatag

SEQ ID NO: 9487 - DNA, 16 bp, Homo sapiens
caagagagatctggcg

SEQ ID NO: 9488 - DNA, 16 bp, Homo sapiens
gattcaacccgaattc

SEQ ID NO: 9489 - DNA, 16 bp, Homo sapiens
tggcatcagaataact

SEQ ID NO: 9490 - DNA, 16 bp, Homo sapiens
ctaccatggtgtctgg

SEQ ID NO: 9491 - DNA, 16 bp, Homo sapiens
atcaagatacagagcg

SEQ ID NO: 9492 - DNA, 16 bp, Homo sapiens
acaattcaccctgtcc

SEQ ID NO: 9493 - DNA, 18 bp, Homo sapiens
catgctaaatacaaatgg

SEQ ID NO: 9494 - DNA, 16 bp, Homo sapiens
tgcaagtccaaaaagt

SEQ ID NO: 9495 - DNA, 14 bp, Homo sapiens
ctgcacaacctgct

SEQ ID NO: 9496 - DNA, 16 bp, Homo sapiens
aaggcctcgttcctcc

SEQ ID NO: 9497 - DNA, 17 bp, Homo sapiens
aaatacagtatgcctcc

SEQ ID NO: 9498 - DNA, 16 bp, Homo sapiens
cagagcggttccgtca

SEQ ID NO: 9499 - DNA, 16 bp, Homo sapiens
gcagtgcccatgttgc

SEQ ID NO: 9500 - DNA, 16 bp, Homo sapiens
tcgcagttttaatgca

SEQ ID NO: 9501 - DNA, 18 bp, Homo sapiens
tacgtcagtgccatcaag

SEQ ID NO: 9502 - DNA, 16 bp, Homo sapiens
gccttaaccgatgctt

SEQ ID NO: 9503 - DNA, 16 bp, Homo sapiens
cagttgtcacttagag

SEQ ID NO: 9504 - DNA, 18 bp, Homo sapiens
tttctcgtcgccctcagc

SEQ ID NO: 9505 - DNA, 16 bp, Homo sapiens
ggctggacaccgcact

SEQ ID NO: 9506 - DNA, 16 bp, Homo sapiens
gtgcagctgcttagct

SEQ ID NO: 9507 - DNA, 16 bp, Homo sapiens
acagtgacctcttccc

SEQ ID NO: 9508 - DNA, 18 bp, Homo sapiens
tgtgttctccgaggaccg

SEQ ID NO: 9509 - DNA, 16 bp, Homo sapiens
tcgctcagtttgacca

SEQ ID NO: 9510 - DNA, 16 bp, Homo sapiens
actgtaaggcttgggc

SEQ ID NO: 9511 - DNA, 16 bp, Homo sapiens
caagacatcaatatct

SEQ ID NO: 9512 - DNA, 16 bp, Homo sapiens
ccctctcgggctcaaa

SEQ ID NO: 9513 - DNA, 16 bp, Homo sapiens
aatgtcccttcttgat

SEQ ID NO: 9514 - DNA, 16 bp, Homo sapiens
tgttgggaatatcact

SEQ ID NO: 9515 - DNA, 20 bp, Homo sapiens
atcaaataaacatcttctgt

SEQ ID NO: 9516 - DNA, 16 bp, Homo sapiens
ataaagtctagaaaat

SEQ ID NO: 9517 - DNA, 12 bp, Homo sapiens
gccagctaaagg

SEQ ID NO: 9518 - DNA, 18 bp, Homo sapiens
ctgtaagattcccagcag

SEQ ID NO: 9519 - DNA, 16 bp, Homo sapiens
agttggggtatgaagg

SEQ ID NO: 9520 - DNA, 16 bp, Homo sapiens
ccgagaaggaccaggc

SEQ ID NO: 9521 - DNA, 16 bp, Homo sapiens
aaaaaaggcgataagt

SEQ ID NO: 9522 - DNA, 16 bp, Homo sapiens
gctctgcagcatcacc

SEQ ID NO: 9523 - DNA, 17 bp, Homo sapiens
taaagtctagaaaatta

SEQ ID NO: 9524 - DNA, 16 bp, Homo sapiens
ggacttggcattcgag

SEQ ID NO: 9525 - DNA, 16 bp, Homo sapiens
ctggctggacaccgca

SEQ ID NO: 9526 - DNA, 16 bp, Homo sapiens
agggcggcctctctct

SEQ ID NO: 9527 - DNA, 25 bp, Homo sapiens
gaaaaacaagaccagcaatcaagag

SEQ ID NO: 9528 - DNA, 16 bp, Homo sapiens
cgggtttgccaatgcc

SEQ ID NO: 9529 - DNA, 20 bp, Homo sapiens
ctgtcctctacatcaattaa

SEQ ID NO: 9530 - DNA, 16 bp, Homo sapiens
gtagtcaacctctcaa

SEQ ID NO: 9531 - DNA, 20 bp, Homo sapiens
tcacacatgaagatgcactt

SEQ ID NO: 9532 - DNA, 16 bp, Homo sapiens
cgctgacagccttgga

SEQ ID NO: 9533 - DNA, 16 bp, Homo sapiens
aggtgaagcattaacc

SEQ ID NO: 9534 - DNA, 20 bp, Homo sapiens
tggcagcacctcacatttga

SEQ ID NO: 9535 - DNA, 12 bp, Homo sapiens
ctgccatctctc

SEQ ID NO: 9536 - DNA, 25 bp, Homo sapiens
ttgtcagaacattgaatgcaactgg

SEQ ID NO: 9537 - DNA, 16 bp, Homo sapiens
cactgcgcaaaggggc

SEQ ID NO: 9538 - DNA, 16 bp, Homo sapiens
ccaggagctaatcaat

SEQ ID NO: 9539 - DNA, 20 bp, Homo sapiens
tcatcatgatcataggcagt

SEQ ID NO: 9540 - DNA, 16 bp, Homo sapiens
tggatggtatttcaag

SEQ ID NO: 9541 - DNA, 16 bp, Homo sapiens
ccagataaaagttcca

SEQ ID NO: 9542 - DNA, 18 bp, Homo sapiens
agtaccctttcgacctgg

SEQ ID NO: 9543 - DNA, 23 bp, Homo sapiens
tgacagatctgttgagaaatggc

SEQ ID NO: 9544 - DNA, 16 bp, Homo sapiens
cgtccactcattgatt

SEQ ID NO: 9545 - DNA, 16 bp, Homo sapiens
caacagtgtgtattga

SEQ ID NO: 9546 - DNA, 16 bp, Homo sapiens
gcccgcctgctctgtt

SEQ ID NO: 9547 - DNA, 16 bp, Homo sapiens
gcagtgctatgttcag

SEQ ID NO: 9548 - DNA, 16 bp, Homo sapiens
ccgcctgtcgatgaca

SEQ ID NO: 9549 - DNA, 20 bp, Homo sapiens
aacggtgatgacccacgtcc

SEQ ID NO: 9550 - DNA, 25 bp, Homo sapiens
ttacctgcaggcgatttgacagatc

SEQ ID NO: 9551 - DNA, 16 bp, Homo sapiens
cttctgctgatcgaca

SEQ ID NO: 9552 - DNA, 12 bp, Homo sapiens
agacggatgcga

SEQ ID NO: 9553 - DNA, 14 bp, Homo sapiens
gatgtacagcagct

SEQ ID NO: 9554 - DNA, 16 bp, Homo sapiens
acaccgcactgcgcaa

SEQ ID NO: 9555 - DNA, 16 bp, Homo sapiens
gtctatttcccttcga

SEQ ID NO: 9556 - DNA, 16 bp, Homo sapiens
caacaacatcagcctg

SEQ ID NO: 9557 - DNA, 16 bp, Homo sapiens
tgtcagggctaaattc

SEQ ID NO: 9558 - DNA, 16 bp, Homo sapiens
cgtgcccgcggcgggg

SEQ ID NO: 9559 - DNA, 16 bp, Homo sapiens
atcaacccgtttcttg

SEQ ID NO: 9560 - DNA, 16 bp, Homo sapiens
aactcagacacttgcc

SEQ ID NO: 9561 - DNA, 16 bp, Homo sapiens
gtatcatcagagagtc

SEQ ID NO: 9562 - DNA, 16 bp, Homo sapiens
ccaggtgtgctttgtc

SEQ ID NO: 9563 - DNA, 16 bp, Homo sapiens
tagggtggtagtccca

SEQ ID NO: 9564 - DNA, 12 bp, Homo sapiens
cagagccatttc

SEQ ID NO: 9565 - DNA, 16 bp, Homo sapiens
ggggagtccagtgacg

SEQ ID NO: 9566 - DNA, 16 bp, Homo sapiens
cagccgggagagcagc

SEQ ID NO: 9567 - DNA, 14 bp, Homo sapiens
gtatacaggaacaa

SEQ ID NO: 9568 - DNA, 16 bp, Homo sapiens
ggagtccaaggtttcc

SEQ ID NO: 9569 - DNA, 16 bp, Homo sapiens
gtgccgagaagctcag

SEQ ID NO: 9570 - DNA, 20 bp, Homo sapiens
tactaaaggacaagtcacca

SEQ ID NO: 9571 - DNA, 18 bp, Homo sapiens
gaggcaagacgagcacac

SEQ ID NO: 9572 - DNA, 16 bp, Homo sapiens
gggtgttgcactttgg

SEQ ID NO: 9573 - DNA, 16 bp, Homo sapiens
gaagtgtgttgatctc

SEQ ID NO: 9574 - DNA, 20 bp, Homo sapiens
actgcttccggtgagactgg

SEQ ID NO: 9575 - DNA, 16 bp, Homo sapiens
aagatgagtgttggcc

SEQ ID NO: 9576 - DNA, 16 bp, Homo sapiens
gcactgcaagtccaaa

SEQ ID NO: 9577 - DNA, 19 bp, Homo sapiens
tttcggcaaggtgatcctg

SEQ ID NO: 9578 - DNA, 16 bp, Homo sapiens
gggtccttatcattac

SEQ ID NO: 9579 - DNA, 16 bp, Homo sapiens
cccagcttcggtggtt

SEQ ID NO: 9580 - DNA, 16 bp, Homo sapiens
agatcctgaaatatcg

SEQ ID NO: 9581 - DNA, 16 bp, Homo sapiens
caagtccaaaaagttt

SEQ ID NO: 9582 - DNA, 16 bp, Homo sapiens
gttgcgagaggagaca

SEQ ID NO: 9583 - DNA, 20 bp, Homo sapiens
gtcacacctttcagcccaat

SEQ ID NO: 9584 - DNA, 18 bp, Homo sapiens
aactggagaaagccttga

SEQ ID NO: 9585 - DNA, 20 bp, Homo sapiens
tgcgaccatgaggagattcg

SEQ ID NO: 9586 - DNA, 16 bp, Homo sapiens
ctatcgttctcttctt

SEQ ID NO: 9587 - DNA, 16 bp, Homo sapiens
gcaggcctgaggtgta

SEQ ID NO: 9588 - DNA, 17 bp, Homo sapiens
ggacagacaatagaaaa

SEQ ID NO: 9589 - DNA, 16 bp, Homo sapiens
tgccagcctttatcat

SEQ ID NO: 9590 - DNA, 20 bp, Homo sapiens
tgaggaaatgagagaaatgc

SEQ ID NO: 9591 - DNA, 16 bp, Homo sapiens
ggcctgaggtgtacat

SEQ ID NO: 9592 - DNA, 16 bp, Homo sapiens
acatccttatgtatga

SEQ ID NO: 9593 - DNA, 12 bp, Homo sapiens
ctggtgtagagg

SEQ ID NO: 9594 - DNA, 16 bp, Homo sapiens
gaggccctgtatggca

SEQ ID NO: 9595 - DNA, 12 bp, Homo sapiens
tcacctggatta

SEQ ID NO: 9596 - DNA, 16 bp, Homo sapiens
ccggttgcgagaggag

SEQ ID NO: 9597 - DNA, 16 bp, Homo sapiens
aatgcagactgtgggt

SEQ ID NO: 9598 - DNA, 16 bp, Homo sapiens
aacccttacctcaatc

SEQ ID NO: 9599 - DNA, 15 bp, Homo sapiens
ccctgaggatggaat

SEQ ID NO: 9600 - DNA, 16 bp, Homo sapiens
agctgtcagtaaaggc

SEQ ID NO: 9601 - DNA, 16 bp, Homo sapiens
gatctcttgatcttaa

SEQ ID NO: 9602 - DNA, 16 bp, Homo sapiens
catgggcggtctttct

SEQ ID NO: 9603 - DNA, 14 bp, Homo sapiens
gccatctgctgccg

SEQ ID NO: 9604 - DNA, 16 bp, Homo sapiens
gcaaagacaaattgca

SEQ ID NO: 9605 - DNA, 20 bp, Homo sapiens
ccattatataatgatgtaat

SEQ ID NO: 9606 - DNA, 16 bp, Homo sapiens
tgcgcttgccgtaggt

SEQ ID NO: 9607 - DNA, 16 bp, Homo sapiens
ttttccctgcacctga

SEQ ID NO: 9608 - DNA, 16 bp, Homo sapiens
gacaaggtctcttgtt

SEQ ID NO: 9609 - DNA, 20 bp, Homo sapiens
ttcaccaaagttgaatcaga

SEQ ID NO: 9610 - DNA, 16 bp, Homo sapiens
actgtcctgatttaga

SEQ ID NO: 9611 - DNA, 18 bp, Homo sapiens
gtgcgggaggtgtttgag

SEQ ID NO: 9612 - DNA, 16 bp, Homo sapiens
tcataaaaaagtgtgc

SEQ ID NO: 9613 - DNA, 16 bp, Homo sapiens
gaagcttccggccgcg

SEQ ID NO: 9614 - DNA, 16 bp, Homo sapiens
tgggagacagtaagtt

SEQ ID NO: 9615 - DNA, 18 bp, Homo sapiens
ccattttcagttccctcc

SEQ ID NO: 9616 - DNA, 16 bp, Homo sapiens
agtgagaaaggttcgc

SEQ ID NO: 9617 - DNA, 16 bp, Homo sapiens
tgggagatatttgcgt

SEQ ID NO: 9618 - DNA, 16 bp, Homo sapiens
ctttgtagtcaacctc

SEQ ID NO: 9619 - DNA, 16 bp, Homo sapiens
tgaaccagatacattt

SEQ ID NO: 9620 - DNA, 16 bp, Homo sapiens
gcggtcagcctttgtt

SEQ ID NO: 9621 - DNA, 12 bp, Homo sapiens
gacatgaagcca

SEQ ID NO: 9622 - DNA, 16 bp, Homo sapiens
gcctgctcccgttttg

SEQ ID NO: 9623 - DNA, 16 bp, Homo sapiens
gcctataagtctagta

SEQ ID NO: 9624 - DNA, 16 bp, Homo sapiens
aaggctgtatgcggtg

SEQ ID NO: 9625 - DNA, 16 bp, Homo sapiens
gctccatgccatagat

SEQ ID NO: 9626 - DNA, 16 bp, Homo sapiens
gaatgccaccatccgc

SEQ ID NO: 9627 - DNA, 15 bp, Homo sapiens
ataaataggctgtac

SEQ ID NO: 9628 - DNA, 16 bp, Homo sapiens
gaaaacagtccaaaca

SEQ ID NO: 9629 - DNA, 16 bp, Homo sapiens
gtcaccgccgctgctg

SEQ ID NO: 9630 - DNA, 16 bp, Homo sapiens
actggcagattacaag

SEQ ID NO: 9631 - DNA, 16 bp, Homo sapiens
ccttggatagatgagg

SEQ ID NO: 9632 - DNA, 16 bp, Homo sapiens
atcctggtgtattcac

SEQ ID NO: 9633 - DNA, 20 bp, Homo sapiens
tgcagtgagttcatgcacct

SEQ ID NO: 9634 - DNA, 16 bp, Homo sapiens
actctttgccttgtgc

SEQ ID NO: 9635 - DNA, 16 bp, Homo sapiens
gcaagtttacttttag

SEQ ID NO: 9636 - DNA, 16 bp, Homo sapiens
agtgtgccgagaagct

SEQ ID NO: 9637 - DNA, 16 bp, Homo sapiens
ggtctgcagcctcgtg

SEQ ID NO: 9638 - DNA, 16 bp, Homo sapiens
cgcctatcctctagtg

SEQ ID NO: 9639 - DNA, 14 bp, Homo sapiens
aagcagactgaggc

SEQ ID NO: 9640 - DNA, 16 bp, Homo sapiens
gggaaaccattacaga

SEQ ID NO: 9641 - DNA, 16 bp, Homo sapiens
tccctctaccttgtgg

SEQ ID NO: 9642 - DNA, 12 bp, Homo sapiens
tggcctgacttt

SEQ ID NO: 9643 - DNA, 16 bp, Homo sapiens
caggccctgcatgttc

SEQ ID NO: 9644 - DNA, 16 bp, Homo sapiens
gctgtatgcggtggtt

SEQ ID NO: 9645 - DNA, 16 bp, Homo sapiens
tcctgaatgaggggtc

SEQ ID NO: 9646 - DNA, 16 bp, Homo sapiens
ggccgtttcccttgcg

SEQ ID NO: 9647 - DNA, 31 bp, Homo sapiens
ggaaaagagcagcaactaaaagaaaagcttg

SEQ ID NO: 9648 - DNA, 18 bp, Homo sapiens
acgcctatgccctgccct

SEQ ID NO: 9649 - DNA, 16 bp, Homo sapiens
tacagtaccaattgcc

SEQ ID NO: 9650 - DNA, 16 bp, Homo sapiens
cccgcctgctctgtta

SEQ ID NO: 9651 - DNA, 18 bp, Homo sapiens
tgccaagtactacctgac

SEQ ID NO: 9652 - DNA, 16 bp, Homo sapiens
actgcaagtccaaaaa

SEQ ID NO: 9653 - DNA, 18 bp, Homo sapiens
ctatgttggtggagaggt

SEQ ID NO: 9654 - DNA, 16 bp, Homo sapiens
cccgtaaactctgagt

SEQ ID NO: 9655 - DNA, 16 bp, Homo sapiens
agcagcctccttctcg

SEQ ID NO: 9656 - DNA, 16 bp, Homo sapiens
taccggcacatggccg

SEQ ID NO: 9657 - DNA, 16 bp, Homo sapiens
gaggagacagagcgaa

SEQ ID NO: 9658 - DNA, 16 bp, Homo sapiens
cggggctcttctggca

SEQ ID NO: 9659 - DNA, 14 bp, Homo sapiens
gcctggttccctga

SEQ ID NO: 9660 - DNA, 16 bp, Homo sapiens
ctgaggtgtacatagt

SEQ ID NO: 9661 - DNA, 16 bp, Homo sapiens
gcttgttcttgtatct

SEQ ID NO: 9662 - DNA, 18 bp, Homo sapiens
gaagtcaaaggggctgcc

SEQ ID NO: 9663 - DNA, 20 bp, Homo sapiens
acaagaacaccttcagaacc

SEQ ID NO: 9664 - DNA, 16 bp, Homo sapiens
ttcttgcctgatacca

SEQ ID NO: 9665 - DNA, 16 bp, Homo sapiens
tcgacctggttatcca

SEQ ID NO: 9666 - DNA, 16 bp, Homo sapiens
gaactgtgccattgaa

SEQ ID NO: 9667 - DNA, 25 bp, Homo sapiens
aattcagaatcagtgggatgaagta

SEQ ID NO: 9668 - DNA, 16 bp, Homo sapiens
cctgtctgaaatgtgt

SEQ ID NO: 9669 - DNA, 16 bp, Homo sapiens
gtagatccctcttctg

SEQ ID NO: 9670 - DNA, 20 bp, Homo sapiens
tagactccgagaacatgacc

SEQ ID NO: 9671 - DNA, 20 bp, Homo sapiens
gactgtgaggtgaacgtgcc

SEQ ID NO: 9672 - DNA, 16 bp, Homo sapiens
gttttgtctagtctag

SEQ ID NO: 9673 - DNA, 16 bp, Homo sapiens
catcggccagagctgc

SEQ ID NO: 9674 - DNA, 16 bp, Homo sapiens
accaatggctattgtt

SEQ ID NO: 9675 - DNA, 16 bp, Homo sapiens
gcaatcctcactggca

SEQ ID NO: 9676 - DNA, 16 bp, Homo sapiens
ggcgggaacctatgga

SEQ ID NO: 9677 - DNA, 16 bp, Homo sapiens
ctgtgcgtgatgagtg

SEQ ID NO: 9678 - DNA, 16 bp, Homo sapiens
gctgtctccggtccac

SEQ ID NO: 9679 - DNA, 12 bp, Homo sapiens
attcaacctagg

SEQ ID NO: 9680 - DNA, 16 bp, Homo sapiens
tggggaactcctgtac

SEQ ID NO: 9681 - DNA, 16 bp, Homo sapiens
actgggagatatttgc

SEQ ID NO: 9682 - DNA, 20 bp, Homo sapiens
aaaatccaggtcatgcagtt

SEQ ID NO: 9683 - DNA, 20 bp, Homo sapiens
gcctatggcaaggccatcct

SEQ ID NO: 9684 - DNA, 20 bp, Homo sapiens
gatacaagtagcctctttga

SEQ ID NO: 9685 - DNA, 16 bp, Homo sapiens
ggcggggagcaacggc

SEQ ID NO: 9686 - DNA, 16 bp, Homo sapiens
gacagagcgaatcgtc

SEQ ID NO: 9687 - DNA, 14 bp, Homo sapiens
tagtgttcaagagg

SEQ ID NO: 9688 - DNA, 16 bp, Homo sapiens
cggggagcaacggcta

SEQ ID NO: 9689 - DNA, 20 bp, Homo sapiens
ggacagtacaggatgcttgc

SEQ ID NO: 9690 - DNA, 16 bp, Homo sapiens
gcagagcggtgcattt

SEQ ID NO: 9691 - DNA, 16 bp, Homo sapiens
ggatgacttaatctct

SEQ ID NO: 9692 - DNA, 18 bp, Homo sapiens
ctctgagtggaaggcggt

SEQ ID NO: 9693 - DNA, 20 bp, Homo sapiens
cctcagcctatggcaaggcc

SEQ ID NO: 9694 - DNA, 16 bp, Homo sapiens
accactctgcttgttc

SEQ ID NO: 9695 - DNA, 16 bp, Homo sapiens
gggcggggactccacc

SEQ ID NO: 9696 - DNA, 16 bp, Homo sapiens
ggcaaattttaatgga

SEQ ID NO: 9697 - DNA, 16 bp, Homo sapiens
cgaaggccttcatcca

SEQ ID NO: 9698 - DNA, 18 bp, Homo sapiens
tgttggtggatggtttca

SEQ ID NO: 9699 - DNA, 18 bp, Homo sapiens
tcatccagtttgttctcc

SEQ ID NO: 9700 - DNA, 16 bp, Homo sapiens
gattaggtttataatc

SEQ ID NO: 9701 - DNA, 25 bp, Homo sapiens
ctagaaatgccatcttccttgatgt

SEQ ID NO: 9702 - DNA, 16 bp, Homo sapiens
tttgttttacctgcgt

SEQ ID NO: 9703 - DNA, 18 bp, Homo sapiens
agaacatcttcaccgcca

SEQ ID NO: 9704 - DNA, 16 bp, Homo sapiens
ttggcccgggccggcc

SEQ ID NO: 9705 - DNA, 16 bp, Homo sapiens
acccggcggcctctca

SEQ ID NO: 9706 - DNA, 12 bp, Homo sapiens
gacctggtgtag

SEQ ID NO: 9707 - DNA, 16 bp, Homo sapiens
taggcagtgtaccagt

SEQ ID NO: 9708 - DNA, 14 bp, Homo sapiens
actttgagttccct

SEQ ID NO: 9709 - DNA, 12 bp, Homo sapiens
tagtcattggaa

SEQ ID NO: 9710 - DNA, 16 bp, Homo sapiens
ggctgcgggcctgttt

SEQ ID NO: 9711 - DNA, 20 bp, Homo sapiens
atccataaattcgacatgat

SEQ ID NO: 9712 - DNA, 16 bp, Homo sapiens
atgagagatggtatag

SEQ ID NO: 9713 - DNA, 16 bp, Homo sapiens
cgacctcctagaatcc

SEQ ID NO: 9714 - DNA, 20 bp, Homo sapiens
atggttctcacagatgatgg

SEQ ID NO: 9715 - DNA, 16 bp, Homo sapiens
ctccaaatacttaatg

SEQ ID NO: 9716 - DNA, 20 bp, Homo sapiens
aactgccctcctcacaatag

SEQ ID NO: 9717 - DNA, 16 bp, Homo sapiens
gatgcttgtaagttca

SEQ ID NO: 9718 - DNA, 18 bp, Homo sapiens
acaagaacaccttcagaa

SEQ ID NO: 9719 - DNA, 16 bp, Homo sapiens
aacactcagtttgtgt

SEQ ID NO: 9720 - DNA, 18 bp, Homo sapiens
agagcgggaagagcacgt

SEQ ID NO: 9721 - DNA, 16 bp, Homo sapiens
gagtgaccatcttcct

SEQ ID NO: 9722 - DNA, 18 bp, Homo sapiens
actctgtcagccagccgc

SEQ ID NO: 9723 - DNA, 16 bp, Homo sapiens
gcttgtcaattactta

SEQ ID NO: 9724 - DNA, 16 bp, Homo sapiens
ctgagccaccatacaa

SEQ ID NO: 9725 - DNA, 16 bp, Homo sapiens
gggagtcgctgccggc

SEQ ID NO: 9726 - DNA, 20 bp, Homo sapiens
gaatctggattatgttatac

SEQ ID NO: 9727 - DNA, 16 bp, Homo sapiens
gcagtcatttagagca

SEQ ID NO: 9728 - DNA, 16 bp, Homo sapiens
cctactccatctgtat

SEQ ID NO: 9729 - DNA, 16 bp, Homo sapiens
atctgccaaacttctg

SEQ ID NO: 9730 - DNA, 19 bp, Homo sapiens
tgcgtgctgaagggcgacg

SEQ ID NO: 9731 - DNA, 20 bp, Homo sapiens
cttctgctcaggcccttgcc

SEQ ID NO: 9732 - DNA, 16 bp, Homo sapiens
ctagatatctattggg

SEQ ID NO: 9733 - DNA, 16 bp, Homo sapiens
tgtcatggttaaatgg

SEQ ID NO: 9734 - DNA, 16 bp, Homo sapiens
tgccctccgcatgacc

SEQ ID NO: 9735 - DNA, 16 bp, Homo sapiens
tcccgggtatcaccaa

SEQ ID NO: 9736 - DNA, 16 bp, Homo sapiens
tgctcaatccaatgct

SEQ ID NO: 9737 - DNA, 20 bp, Homo sapiens
ttataaataggctgtaccag

SEQ ID NO: 9738 - DNA, 16 bp, Homo sapiens
caatacagttaggcag

SEQ ID NO: 9739 - DNA, 18 bp, Homo sapiens
ttcccgttttattccagt

SEQ ID NO: 9740 - DNA, 16 bp, Homo sapiens
ggccttcccacttacc

SEQ ID NO: 9741 - DNA, 16 bp, Homo sapiens
gcaaggagttcctatc

SEQ ID NO: 9742 - DNA, 12 bp, Homo sapiens
cagtgcaggatc

SEQ ID NO: 9743 - DNA, 16 bp, Homo sapiens
gaaactgaacatggat

SEQ ID NO: 9744 - DNA, 18 bp, Homo sapiens
gctaaggaagaagctgag

SEQ ID NO: 9745 - DNA, 18 bp, Homo sapiens
agaacaccttcagaaccg

SEQ ID NO: 9746 - DNA, 16 bp, Homo sapiens
acagcccagttagttc

SEQ ID NO: 9747 - DNA, 18 bp, Homo sapiens
taaaacaccatgaaaata

SEQ ID NO: 9748 - DNA, 16 bp, Homo sapiens
gggggccgggaaaaga

SEQ ID NO: 9749 - DNA, 18 bp, Homo sapiens
ccttcagaaccggaggca

SEQ ID NO: 9750 - DNA, 16 bp, Homo sapiens
tgaactcagtaatgcg

SEQ ID NO: 9751 - DNA, 20 bp, Homo sapiens
atgggtaaagccatttacat

SEQ ID NO: 9752 - DNA, 16 bp, Homo sapiens
tcatcgacctcccggg

SEQ ID NO: 9753 - DNA, 14 bp, Homo sapiens
gcacaacctgctgg

SEQ ID NO: 9754 - DNA, 16 bp, Homo sapiens
gtgatgggggttactt

SEQ ID NO: 9755 - DNA, 16 bp, Homo sapiens
tcacatcttatacgga

SEQ ID NO: 9756 - DNA, 19 bp, Homo sapiens
tattaaaagaatccaaatt

SEQ ID NO: 9757 - DNA, 16 bp, Homo sapiens
ggggccaggtcgttga

SEQ ID NO: 9758 - DNA, 16 bp, Homo sapiens
cctgctgtccatacac

SEQ ID NO: 9759 - DNA, 16 bp, Homo sapiens
gtccaagtgctttttc

SEQ ID NO: 9760 - DNA, 16 bp, Homo sapiens
cccaaggcctacggac

SEQ ID NO: 9761 - DNA, 16 bp, Homo sapiens
aagatgtcctaaagcg

SEQ ID NO: 9762 - DNA, 16 bp, Homo sapiens
atgatgcaatagtact

SEQ ID NO: 9763 - DNA, 16 bp, Homo sapiens
tcatcaacaagtccat

SEQ ID NO: 9764 - DNA, 16 bp, Homo sapiens
agtaacatgttatgac

SEQ ID NO: 9765 - DNA, 16 bp, Homo sapiens
ccctgtgaataaatac

SEQ ID NO: 9766 - DNA, 16 bp, Homo sapiens
gtgcgggcacatccct

SEQ ID NO: 9767 - DNA, 16 bp, Homo sapiens
ccggcaggagattgaa

SEQ ID NO: 9768 - DNA, 16 bp, Homo sapiens
tggaagtgtcctccca

SEQ ID NO: 9769 - DNA, 16 bp, Homo sapiens
tgtccctatcatgctg

SEQ ID NO: 9770 - DNA, 16 bp, Homo sapiens
agggcaggccttctat

SEQ ID NO: 9771 - DNA, 16 bp, Homo sapiens
tatccttggcctgtga

SEQ ID NO: 9772 - DNA, 16 bp, Homo sapiens
gggtatatcaacttcc

SEQ ID NO: 9773 - DNA, 16 bp, Homo sapiens
cgtagcaaactacaga

SEQ ID NO: 9774 - DNA, 20 bp, Homo sapiens
gtggtgtaattgggatcgcc

SEQ ID NO: 9775 - DNA, 16 bp, Homo sapiens
ggcattcagcatttac

SEQ ID NO: 9776 - DNA, 16 bp, Homo sapiens
ggcccggagccgttgg

SEQ ID NO: 9777 - DNA, 15 bp, Homo sapiens
gagccttcttgttct

SEQ ID NO: 9778 - DNA, 16 bp, Homo sapiens
aggactggacattgca

SEQ ID NO: 9779 - DNA, 16 bp, Homo sapiens
agtgatcagtgttcac

SEQ ID NO: 9780 - DNA, 16 bp, Homo sapiens
tctgagatagatgtgg

SEQ ID NO: 9781 - DNA, 20 bp, Homo sapiens
tggtgtggccgatgtgtcta

SEQ ID NO: 9782 - DNA, 16 bp, Homo sapiens
agagttctgagttgtc

SEQ ID NO: 9783 - DNA, 16 bp, Homo sapiens
cgtcccttccatctct

SEQ ID NO: 9784 - DNA, 16 bp, Homo sapiens
tcacccactcctcgct

SEQ ID NO: 9785 - DNA, 16 bp, Homo sapiens
ctgctgtccatatcct

SEQ ID NO: 9786 - DNA, 16 bp, Homo sapiens
cgcttgcgtgcccgcg

SEQ ID NO: 9787 - DNA, 16 bp, Homo sapiens
gtccctatcatgctga

SEQ ID NO: 9788 - DNA, 20 bp, Homo sapiens
attggccgcacactggtggt

SEQ ID NO: 9789 - DNA, 20 bp, Homo sapiens
cctgatggccatgaacagca

SEQ ID NO: 9790 - DNA, 16 bp, Homo sapiens
cctcctcgcctcaaat

SEQ ID NO: 9791 - DNA, 16 bp, Homo sapiens
agagtgccgtagtttc

SEQ ID NO: 9792 - DNA, 16 bp, Homo sapiens
ttccgtcacctcctaa

SEQ ID NO: 9793 - DNA, 16 bp, Homo sapiens
agactgagctcattac

SEQ ID NO: 9794 - DNA, 16 bp, Homo sapiens
accctctccaattatc

SEQ ID NO: 9795 - DNA, 16 bp, Homo sapiens
acagtctgatgtctaa

SEQ ID NO: 9796 - DNA, 16 bp, Homo sapiens
aggctccatgatgttc

SEQ ID NO: 9797 - DNA, 16 bp, Homo sapiens
gagggctgctcttagc

SEQ ID NO: 9798 - DNA, 16 bp, Homo sapiens
gccgttggcccgggcc

SEQ ID NO: 9799 - DNA, 16 bp, Homo sapiens
tgccgaggcccgggcg

SEQ ID NO: 9800 - DNA, 20 bp, Homo sapiens
aaaaaccatgtagatggcat

SEQ ID NO: 9801 - DNA, 16 bp, Homo sapiens
cagcctgatgaaaggc

SEQ ID NO: 9802 - DNA, 16 bp, Homo sapiens
tgttgctgggctttaa

SEQ ID NO: 9803 - DNA, 16 bp, Homo sapiens
ggcgataagtatgatg

SEQ ID NO: 9804 - DNA, 15 bp, Homo sapiens
tgatggtgaagaaga

SEQ ID NO: 9805 - DNA, 16 bp, Homo sapiens
gcttaaaagcctcctt

SEQ ID NO: 9806 - DNA, 16 bp, Homo sapiens
cgaatcgtcaccactt

SEQ ID NO: 9807 - DNA, 16 bp, Homo sapiens
acctgagacactgcgt

SEQ ID NO: 9808 - DNA, 16 bp, Homo sapiens
aggcggcgaccgtgag

SEQ ID NO: 9809 - DNA, 16 bp, Homo sapiens
acccgcacctggtcac

SEQ ID NO: 9810 - DNA, 16 bp, Homo sapiens
gcaacggctacagacg

SEQ ID NO: 9811 - DNA, 16 bp, Homo sapiens
ggccagtggattgtta

SEQ ID NO: 9812 - DNA, 16 bp, Homo sapiens
gccctataataaactt

SEQ ID NO: 9813 - DNA, 16 bp, Homo sapiens
gcctagaacctttcac

SEQ ID NO: 9814 - DNA, 16 bp, Homo sapiens
cctctgtgggcttatc

SEQ ID NO: 9815 - DNA, 16 bp, Homo sapiens
aatcaatcgcatcttc

SEQ ID NO: 9816 - DNA, 16 bp, Homo sapiens
ggcagccaccttccgt

SEQ ID NO: 9817 - DNA, 16 bp, Homo sapiens
tgtcatggacatgaat

SEQ ID NO: 9818 - DNA, 16 bp, Homo sapiens
ttggtgcttcctgaac

SEQ ID NO: 9819 - DNA, 16 bp, Homo sapiens
tgcaggggtatatcaa

SEQ ID NO: 9820 - DNA, 16 bp, Homo sapiens
ccactacacttcggct

SEQ ID NO: 9821 - DNA, 16 bp, Homo sapiens
gtggatgcatagttgc

SEQ ID NO: 9822 - DNA, 12 bp, Homo sapiens
gcatacaattta

SEQ ID NO: 9823 - DNA, 16 bp, Homo sapiens
aggtttgcctgtaccc

SEQ ID NO: 9824 - DNA, 15 bp, Homo sapiens
attattaggcatgtt

SEQ ID NO: 9825 - DNA, 16 bp, Homo sapiens
tccatgccatagatgt

SEQ ID NO: 9826 - DNA, 16 bp, Homo sapiens
ggtagcaaacattaga

SEQ ID NO: 9827 - DNA, 16 bp, Homo sapiens
gcataatccagtccgt

SEQ ID NO: 9828 - DNA, 12 bp, Homo sapiens
attgcctgtgtg

SEQ ID NO: 9829 - DNA, 16 bp, Homo sapiens
tggacaccgcactgcg

SEQ ID NO: 9830 - DNA, 16 bp, Homo sapiens
tggtgaaggtagtgcc

SEQ ID NO: 9831 - DNA, 16 bp, Homo sapiens
gggacttgttaaagtg

SEQ ID NO: 9832 - DNA, 16 bp, Homo sapiens
tcagaccttggttgcc

SEQ ID NO: 9833 - DNA, 15 bp, Homo sapiens
cccacaggggcaagt

SEQ ID NO: 9834 - DNA, 20 bp, Homo sapiens
gtttgaactaactggacaca

SEQ ID NO: 9835 - DNA, 15 bp, Homo sapiens
gaagtctgtgccctt

SEQ ID NO: 9836 - DNA, 16 bp, Homo sapiens
accctcatcgacctcc

SEQ ID NO: 9837 - DNA, 16 bp, Homo sapiens
gcctgctctgttaatg

SEQ ID NO: 9838 - DNA, 20 bp, Homo sapiens
agatgcacttgcaaagggct

SEQ ID NO: 9839 - DNA, 16 bp, Homo sapiens
gaggggtggcttgccc

SEQ ID NO: 9840 - DNA, 16 bp, Homo sapiens
gggctgaaatttattc

SEQ ID NO: 9841 - DNA, 20 bp, Homo sapiens
tccatgcagccttggggcat

SEQ ID NO: 9842 - DNA, 16 bp, Homo sapiens
tccgtgcagcactggc

SEQ ID NO: 9843 - DNA, 16 bp, Homo sapiens
cgcggggccaggtcgt

SEQ ID NO: 9844 - DNA, 16 bp, Homo sapiens
ggtccctgctatattt

SEQ ID NO: 9845 - DNA, 16 bp, Homo sapiens
gggggattcataatat

SEQ ID NO: 9846 - DNA, 20 bp, Homo sapiens
agctacaggaagctctctcc

SEQ ID NO: 9847 - DNA, 16 bp, Homo sapiens
tcgccacacggtaggc

SEQ ID NO: 9848 - DNA, 16 bp, Homo sapiens
gtttgaccactgtaag

SEQ ID NO: 9849 - DNA, 16 bp, Homo sapiens
tgtaaaccgtaattta

SEQ ID NO: 9850 - DNA, 16 bp, Homo sapiens
tgggggggactctacc

SEQ ID NO: 9851 - DNA, 16 bp, Homo sapiens
cttgccaaaccactgc

SEQ ID NO: 9852 - DNA, 16 bp, Homo sapiens
gtcaggcacctaggtc

SEQ ID NO: 9853 - DNA, 16 bp, Homo sapiens
gagcggttcccatttg

SEQ ID NO: 9854 - DNA, 15 bp, Homo sapiens
agacacccggcacca

SEQ ID NO: 9855 - DNA, 16 bp, Homo sapiens
cctcgctcagtttgac

SEQ ID NO: 9856 - DNA, 16 bp, Homo sapiens
caggccctgtgttacc

SEQ ID NO: 9857 - DNA, 17 bp, Homo sapiens
aagatctgagctctgag

SEQ ID NO: 9858 - DNA, 16 bp, Homo sapiens
tgtgtgccaatagacc

SEQ ID NO: 9859 - DNA, 16 bp, Homo sapiens
ctgtactgatagtatc

SEQ ID NO: 9860 - DNA, 12 bp, Homo sapiens
agatattctgac

SEQ ID NO: 9861 - DNA, 16 bp, Homo sapiens
gagaggagacagagcg

SEQ ID NO: 9862 - DNA, 16 bp, Homo sapiens
ggcagcccacatagac

SEQ ID NO: 9863 - DNA, 16 bp, Homo sapiens
cccttcatgcttagcc

SEQ ID NO: 9864 - DNA, 16 bp, Homo sapiens
cccatctcggccagtt

SEQ ID NO: 9865 - DNA, 16 bp, Homo sapiens
cccagagcgtgtttgc

SEQ ID NO: 9866 - DNA, 14 bp, Homo sapiens
aatgtggcaacaga

SEQ ID NO: 9867 - DNA, 16 bp, Homo sapiens
gaacatggcacttcct

SEQ ID NO: 9868 - DNA, 16 bp, Homo sapiens
cttctgcccgatttga

SEQ ID NO: 9869 - DNA, 20 bp, Homo sapiens
tctgctctagggaatctgga

SEQ ID NO: 9870 - DNA, 16 bp, Homo sapiens
gtccggcaggagattg

SEQ ID NO: 9871 - DNA, 16 bp, Homo sapiens
ggaattgataattctg

SEQ ID NO: 9872 - DNA, 16 bp, Homo sapiens
tcagagcctttagcga

SEQ ID NO: 9873 - DNA, 16 bp, Homo sapiens
cgagagtaggttcctg

SEQ ID NO: 9874 - DNA, 16 bp, Homo sapiens
tcgtgggccggtgagc

SEQ ID NO: 9875 - DNA, 16 bp, Homo sapiens
tggacattgcatctag

SEQ ID NO: 9876 - DNA, 19 bp, Homo sapiens
tagtatcccacttgaacct

SEQ ID NO: 9877 - DNA, 18 bp, Homo sapiens
agaacttaccgactggct

SEQ ID NO: 9878 - DNA, 20 bp, Homo sapiens
attgaaattcctttagatag

SEQ ID NO: 9879 - DNA, 16 bp, Homo sapiens
tcctgatcaaataggg

SEQ ID NO: 9880 - DNA, 16 bp, Homo sapiens
gcaggaacctctttca

SEQ ID NO: 9881 - DNA, 16 bp, Homo sapiens
ctgggccaagattaca

SEQ ID NO: 9882 - DNA, 16 bp, Homo sapiens
gggtggggtccttatc

SEQ ID NO: 9883 - DNA, 16 bp, Homo sapiens
ttattagtttagagcc

SEQ ID NO: 9884 - DNA, 16 bp, Homo sapiens
gtctggggccctccgc

SEQ ID NO: 9885 - DNA, 16 bp, Homo sapiens
tgctgcagtatgtacc

SEQ ID NO: 9886 - DNA, 16 bp, Homo sapiens
ggtccctgggatggca

SEQ ID NO: 9887 - DNA, 16 bp, Homo sapiens
cgggtcttatatacac

SEQ ID NO: 9888 - DNA, 16 bp, Homo sapiens
tgttaataatctggct

SEQ ID NO: 9889 - DNA, 16 bp, Homo sapiens
tctagttcacttgggc

SEQ ID NO: 9890 - DNA, 16 bp, Homo sapiens
tcctccttggatagat

SEQ ID NO: 9891 - DNA, 20 bp, Homo sapiens
atctttgacttcactcatcc

SEQ ID NO: 9892 - DNA, 16 bp, Homo sapiens
ttctgctgatcgacat

SEQ ID NO: 9893 - DNA, 20 bp, Homo sapiens
ccagaacttgtgcaccaagg

SEQ ID NO: 9894 - DNA, 15 bp, Homo sapiens
atggaaatatgcttg

SEQ ID NO: 9895 - DNA, 16 bp, Homo sapiens
gcccatcaaccttcga

SEQ ID NO: 9896 - DNA, 16 bp, Homo sapiens
acagagcgaatcgtca

SEQ ID NO: 9897 - DNA, 16 bp, Homo sapiens
gatcaacaatgtgagt

SEQ ID NO: 9898 - DNA, 18 bp, Homo sapiens
atacaggaacaatattga

SEQ ID NO: 9899 - DNA, 18 bp, Homo sapiens
tgttgatgctttggtgaa

SEQ ID NO: 9900 - DNA, 20 bp, Homo sapiens
ggcaaaggtggaaatgaaga

SEQ ID NO: 9901 - DNA, 25 bp, Homo sapiens
ggaacagaggcgtccccagttggaa

SEQ ID NO: 9902 - DNA, 12 bp, Homo sapiens
aacttgcaatcc

SEQ ID NO: 9903 - DNA, 19 bp, Homo sapiens
ctgttgagaaatggcggcg

SEQ ID NO: 9904 - DNA, 20 bp, Homo sapiens
tcaaatccagaggctagcag

SEQ ID NO: 9905 - DNA, 16 bp, Homo sapiens
tgggctcctcttcagt

SEQ ID NO: 9906 - DNA, 18 bp, Homo sapiens
caacccggtgctgactgg

SEQ ID NO: 9907 - DNA, 20 bp, Homo sapiens
gaagccctaacgtgttatct

SEQ ID NO: 9908 - DNA, 20 bp, Homo sapiens
gcgacaatgacagctgacaa

SEQ ID NO: 9909 - DNA, 16 bp, Homo sapiens
gttcaggaatcgtcac

SEQ ID NO: 9910 - DNA, 18 bp, Homo sapiens
gctactcggaggaggaca

SEQ ID NO: 9911 - DNA, 16 bp, Homo sapiens
tcctgtacaaattttc

SEQ ID NO: 9912 - DNA, 20 bp, Homo sapiens
tgtaaatgtagctgagaccc

SEQ ID NO: 9913 - DNA, 16 bp, Homo sapiens
ccctgctgcagtatgt

SEQ ID NO: 9914 - DNA, 16 bp, Homo sapiens
gctaggcccggagccg

SEQ ID NO: 9915 - DNA, 14 bp, Homo sapiens
ctgaacatcaagag

SEQ ID NO: 9916 - DNA, 25 bp, Homo sapiens
ccttcagaaccggaggcaacagttg

SEQ ID NO: 9917 - DNA, 16 bp, Homo sapiens
tataatagcacttctt

SEQ ID NO: 9918 - DNA, 16 bp, Homo sapiens
gtacaagaactttcgg

SEQ ID NO: 9919 - DNA, 16 bp, Homo sapiens
gagctcttgaatttgg

SEQ ID NO: 9920 - DNA, 18 bp, Homo sapiens
gacgctcaagatcctcta

SEQ ID NO: 9921 - DNA, 16 bp, Homo sapiens
caggtccctgctatat

SEQ ID NO: 9922 - DNA, 16 bp, Homo sapiens
tgattcctgttcccgt

SEQ ID NO: 9923 - DNA, 16 bp, Homo sapiens
gcatcctgtaaatcaa

SEQ ID NO: 9924 - DNA, 16 bp, Homo sapiens
gccctgtgatagagca

SEQ ID NO: 9925 - DNA, 14 bp, Homo sapiens
cctgcaaagggaac

SEQ ID NO: 9926 - DNA, 16 bp, Homo sapiens
ccactactccctagca

SEQ ID NO: 9927 - DNA, 14 bp, Homo sapiens
ggccgcggtgttca

SEQ ID NO: 9928 - DNA, 20 bp, Homo sapiens
gtgttctatgagctggccca

SEQ ID NO: 9929 - DNA, 16 bp, Homo sapiens
cctataatccgtggga

SEQ ID NO: 9930 - DNA, 16 bp, Homo sapiens
tggaatctgcctacgg

SEQ ID NO: 9931 - DNA, 16 bp, Homo sapiens
gcctgcctctagttca

SEQ ID NO: 9932 - DNA, 16 bp, Homo sapiens
aaatggggatcttaga

SEQ ID NO: 9933 - DNA, 16 bp, Homo sapiens
agccatggctgtgtta

SEQ ID NO: 9934 - DNA, 20 bp, Homo sapiens
aactaactggacacagtgtg

SEQ ID NO: 9935 - DNA, 16 bp, Homo sapiens
atgggacataattatc

SEQ ID NO: 9936 - DNA, 16 bp, Homo sapiens
tgtttactcgttgtgg

SEQ ID NO: 9937 - DNA, 25 bp, Homo sapiens
ggagcctgtaagtatactggatccc

SEQ ID NO: 9938 - DNA, 18 bp, Homo sapiens
ataccactataagagagt

SEQ ID NO: 9939 - DNA, 16 bp, Homo sapiens
cagaatttcctttcga

SEQ ID NO: 9940 - DNA, 16 bp, Homo sapiens
ctgctgatcgacattg

SEQ ID NO: 9941 - DNA, 16 bp, Homo sapiens
gggaagcaactcagcc

SEQ ID NO: 9942 - DNA, 18 bp, Homo sapiens
accagcccaacaacactc

SEQ ID NO: 9943 - DNA, 16 bp, Homo sapiens
ccttggcagcgtgatt

SEQ ID NO: 9944 - DNA, 20 bp, Homo sapiens
gataatacagcaggctgtac

SEQ ID NO: 9945 - DNA, 16 bp, Homo sapiens
ctatactcctcggcag

SEQ ID NO: 9946 - DNA, 16 bp, Homo sapiens
gtgtcatggacatgaa

SEQ ID NO: 9947 - DNA, 16 bp, Homo sapiens
gggagcctgttaagaa

SEQ ID NO: 9948 - DNA, 16 bp, Homo sapiens
ctacagcctacaaatt

SEQ ID NO: 9949 - DNA, 16 bp, Homo sapiens
catgaagaccctcatc

SEQ ID NO: 9950 - DNA, 16 bp, Homo sapiens
aaatgtgtcgacctgg

SEQ ID NO: 9951 - DNA, 16 bp, Homo sapiens
cggccgagtgtttccc

SEQ ID NO: 9952 - DNA, 20 bp, Homo sapiens
ttctagatcgtttagctcta

SEQ ID NO: 9953 - DNA, 16 bp, Homo sapiens
gggcagctccgtgccg

SEQ ID NO: 9954 - DNA, 17 bp, Homo sapiens
ctcactgggatgaacta

SEQ ID NO: 9955 - DNA, 16 bp, Homo sapiens
agcaggacacctgttg

SEQ ID NO: 9956 - DNA, 16 bp, Homo sapiens
cgctgaatcaggtact

SEQ ID NO: 9957 - DNA, 18 bp, Homo sapiens
tttccatcctgcagaaga

SEQ ID NO: 9958 - DNA, 16 bp, Homo sapiens
ggctgttgttgtaatc

SEQ ID NO: 9959 - DNA, 16 bp, Homo sapiens
acaccagacaattgtt

SEQ ID NO: 9960 - DNA, 20 bp, Homo sapiens
tcacagatgggtattaaact

SEQ ID NO: 9961 - DNA, 15 bp, Homo sapiens
tcatctgtggtgagt

SEQ ID NO: 9962 - DNA, 16 bp, Homo sapiens
gcgccggccgtaatga

SEQ ID NO: 9963 - DNA, 16 bp, Homo sapiens
agccgatcctatgcca

SEQ ID NO: 9964 - DNA, 16 bp, Homo sapiens
gtcgctcgggtcgggt

SEQ ID NO: 9965 - DNA, 16 bp, Homo sapiens
cccaggtacttcagta

SEQ ID NO: 9966 - DNA, 16 bp, Homo sapiens
gctttgcagtttgccg

SEQ ID NO: 9967 - DNA, 18 bp, Homo sapiens
gcaggcgcgagtaccagc

SEQ ID NO: 9968 - DNA, 18 bp, Homo sapiens
tgaccaccttcgagcatc

SEQ ID NO: 9969 - DNA, 20 bp, Homo sapiens
gtgccacatcatcaccatat

SEQ ID NO: 9970 - DNA, 14 bp, Homo sapiens
catccagctggtga

SEQ ID NO: 9971 - DNA, 20 bp, Homo sapiens
tgggagcctgcctgccttca

SEQ ID NO: 9972 - DNA, 15 bp, Homo sapiens
gagcagaaggcaagg

SEQ ID NO: 9973 - DNA, 20 bp, Homo sapiens
ttcaatgtgtcctcagtgga

SEQ ID NO: 9974 - DNA, 20 bp, Homo sapiens
ggtggcagcacctcacattt

SEQ ID NO: 9975 - DNA, 16 bp, Homo sapiens
ctgaggttgagttcga

SEQ ID NO: 9976 - DNA, 14 bp, Homo sapiens
ggattcaaagcata

SEQ ID NO: 9977 - DNA, 12 bp, Homo sapiens
cctgatcattat

SEQ ID NO: 9978 - DNA, 16 bp, Homo sapiens
cgctgccggccctacg

SEQ ID NO: 9979 - DNA, 16 bp, Homo sapiens
tgaaatgtgtcgacct

SEQ ID NO: 9980 - DNA, 19 bp, Homo sapiens
ttgaagattctgtgatctc

SEQ ID NO: 9981 - DNA, 16 bp, Homo sapiens
cgggaacgggagggga

SEQ ID NO: 9982 - DNA, 18 bp, Homo sapiens
cctgctggaggacaagat

SEQ ID NO: 9983 - DNA, 18 bp, Homo sapiens
gccacccgtttcctcact

SEQ ID NO: 9984 - DNA, 16 bp, Homo sapiens
gttgctcccgttgaga

SEQ ID NO: 9985 - DNA, 12 bp, Homo sapiens
ccctacatcagt

SEQ ID NO: 9986 - DNA, 18 bp, Homo sapiens
aaagcagcctgacctagc

SEQ ID NO: 9987 - DNA, 16 bp, Homo sapiens
cggttcccatttgagc

SEQ ID NO: 9988 - DNA, 18 bp, Homo sapiens
gaaggagtacaatctggt

SEQ ID NO: 9989 - DNA, 14 bp, Homo sapiens
cggaacttgcaatc

SEQ ID NO: 9990 - DNA, 16 bp, Homo sapiens
ccctctcgggatgcac

SEQ ID NO: 9991 - DNA, 16 bp, Homo sapiens
agcccggccagtgcaa

SEQ ID NO: 9992 - DNA, 16 bp, Homo sapiens
aggttaataatcatga

SEQ ID NO: 9993 - DNA, 14 bp, Homo sapiens
aacctgcctgtgca

SEQ ID NO: 9994 - DNA, 18 bp, Homo sapiens
cttgacctctgtgaccaa

SEQ ID NO: 9995 - DNA, 16 bp, Homo sapiens
tgaaaccctgatgtgt

SEQ ID NO: 9996 - DNA, 16 bp, Homo sapiens
ctggtggaagctttta

SEQ ID NO: 9997 - DNA, 16 bp, Homo sapiens
agttgcttacatctat

SEQ ID NO: 9998 - DNA, 16 bp, Homo sapiens
gactcctcccatgggc

SEQ ID NO: 9999 - DNA, 16 bp, Homo sapiens
agcttcttcgattaga

SEQ ID NO: 10000 - DNA, 16 bp, Homo sapiens
gggcatcaccattgtc

SEQ ID NO: 10001 - DNA, 14 bp, Homo sapiens
tgaactggacctgc

SEQ ID NO: 10002 - DNA, 16 bp, Homo sapiens
gaagccctgcatggca

SEQ ID NO: 10003 - DNA, 19 bp, Homo sapiens
cattaaacactgtaatctt

SEQ ID NO: 10004 - DNA, 18 bp, Homo sapiens
tgatgaggagttcacggc

SEQ ID NO: 10005 - DNA, 16 bp, Homo sapiens
taatgagtccctggtg

SEQ ID NO: 10006 - DNA, 14 bp, Homo sapiens
atgtacaccttctg

SEQ ID NO: 10007 - DNA, 16 bp, Homo sapiens
ctgcggcagatcgagc

SEQ ID NO: 10008 - DNA, 16 bp, Homo sapiens
ctcagtttgaccactg

SEQ ID NO: 10009 - DNA, 20 bp, Homo sapiens
cagcgacaatgacagctgac

SEQ ID NO: 10010 - DNA, 16 bp, Homo sapiens
gccggtcacaattgtc

SEQ ID NO: 10011 - DNA, 16 bp, Homo sapiens
ttcaggaatcgtcacc

SEQ ID NO: 10012 - DNA, 16 bp, Homo sapiens
tgggatagttgaagcc

SEQ ID NO: 10013 - DNA, 12 bp, Homo sapiens
gacctatattta

SEQ ID NO: 10014 - DNA, 16 bp, Homo sapiens
agccttctgtctccgc

SEQ ID NO: 10015 - DNA, 16 bp, Homo sapiens
atgatgcggaattcaa

SEQ ID NO: 10016 - DNA, 16 bp, Homo sapiens
tttaggtcattatcgg

SEQ ID NO: 10017 - DNA, 21 bp, Homo sapiens
aacccttttgtgaagatcttg

SEQ ID NO: 10018 - DNA, 16 bp, Homo sapiens
aacaggtcttctggaa

SEQ ID NO: 10019 - DNA, 16 bp, Homo sapiens
gtttcccttgcgcagc

SEQ ID NO: 10020 - DNA, 14 bp, Homo sapiens
atcatgttgcagca

SEQ ID NO: 10021 - DNA, 14 bp, Homo sapiens
ccttggcaccacaa

SEQ ID NO: 10022 - DNA, 16 bp, Homo sapiens
agccgtcctgcgcagc

SEQ ID NO: 10023 - DNA, 16 bp, Homo sapiens
ggctgacttgttgtgt

SEQ ID NO: 10024 - DNA, 16 bp, Homo sapiens
gcccggggccatagac

SEQ ID NO: 10025 - DNA, 17 bp, Homo sapiens
ttctcactgggatgaac

SEQ ID NO: 10026 - DNA, 25 bp, Homo sapiens
agtacaagaacaccttcagaaccgg

SEQ ID NO: 10027 - DNA, 16 bp, Homo sapiens
tgccgctcctctagca

SEQ ID NO: 10028 - DNA, 18 bp, Homo sapiens
gccgtgaaggacaccatc

SEQ ID NO: 10029 - DNA, 14 bp, Homo sapiens
tctgtctggctgat

SEQ ID NO: 10030 - DNA, 18 bp, Homo sapiens
gcggtccagagccaagcg

SEQ ID NO: 10031 - DNA, 16 bp, Homo sapiens
agggagcctgttaaga

SEQ ID NO: 10032 - DNA, 16 bp, Homo sapiens
cgctggggtgttgcac

SEQ ID NO: 10033 - DNA, 20 bp, Homo sapiens
gtggaagccattaggggaca

SEQ ID NO: 10034 - DNA, 16 bp, Homo sapiens
gcaaacaagtaattgg

SEQ ID NO: 10035 - DNA, 16 bp, Homo sapiens
gatttggccaattgct

SEQ ID NO: 10036 - DNA, 16 bp, Homo sapiens
tggctggttttatagc

SEQ ID NO: 10037 - DNA, 16 bp, Homo sapiens
gccgagaagctcagtt

SEQ ID NO: 10038 - DNA, 16 bp, Homo sapiens
tagtgaactagtcctg

SEQ ID NO: 10039 - DNA, 16 bp, Homo sapiens
gaggctgtgttatcat

SEQ ID NO: 10040 - DNA, 16 bp, Homo sapiens
cagaacccttgacacc

SEQ ID NO: 10041 - DNA, 16 bp, Homo sapiens
ggactggacattgcat

SEQ ID NO: 10042 - DNA, 16 bp, Homo sapiens
cagacaattgttgtta

SEQ ID NO: 10043 - DNA, 16 bp, Homo sapiens
acaaatgacaataacg

SEQ ID NO: 10044 - DNA, 16 bp, Homo sapiens
ctctaccaaggtcttc

SEQ ID NO: 10045 - DNA, 12 bp, Homo sapiens
tggtcatgccag

SEQ ID NO: 10046 - DNA, 16 bp, Homo sapiens
acctcaagatccgtga

SEQ ID NO: 10047 - DNA, 14 bp, Homo sapiens
ccaaggcaccctgc

SEQ ID NO: 10048 - DNA, 16 bp, Homo sapiens
agacaaccgactatca

SEQ ID NO: 10049 - DNA, 16 bp, Homo sapiens
cactcctcgctcagtt

SEQ ID NO: 10050 - DNA, 16 bp, Homo sapiens
gtctgtcattagttta

SEQ ID NO: 10051 - DNA, 16 bp, Homo sapiens
ccctcttcctatgctc

SEQ ID NO: 10052 - DNA, 16 bp, Homo sapiens
ggccaatcgcataaat

SEQ ID NO: 10053 - DNA, 15 bp, Homo sapiens
ggggcaagtttccag

SEQ ID NO: 10054 - DNA, 16 bp, Homo sapiens
caccctgtacttttgt

SEQ ID NO: 10055 - DNA, 16 bp, Homo sapiens
aaaaatccgtgtgtga

SEQ ID NO: 10056 - DNA, 20 bp, Homo sapiens
tggccatgaacagcatcttt

SEQ ID NO: 10057 - DNA, 16 bp, Homo sapiens
cttcgattagaaaagg

SEQ ID NO: 10058 - DNA, 15 bp, Homo sapiens
accttcagaaccgga

SEQ ID NO: 10059 - DNA, 16 bp, Homo sapiens
tacatgcttagtgtgg

SEQ ID NO: 10060 - DNA, 16 bp, Homo sapiens
cagacccattttaatg

SEQ ID NO: 10061 - DNA, 20 bp, Homo sapiens
tagttttataaaactcagtt

SEQ ID NO: 10062 - DNA, 16 bp, Homo sapiens
aggacaccgcctcctc

SEQ ID NO: 10063 - DNA, 19 bp, Homo sapiens
ctgctagctgtagaaatgt

SEQ ID NO: 10064 - DNA, 16 bp, Homo sapiens
gggccacttagtggct

SEQ ID NO: 10065 - DNA, 12 bp, Homo sapiens
tttaactgcaga

SEQ ID NO: 10066 - DNA, 16 bp, Homo sapiens
accctgtgatattctc

SEQ ID NO: 10067 - DNA, 20 bp, Homo sapiens
aataaacatcttctgtggaa

SEQ ID NO: 10068 - DNA, 16 bp, Homo sapiens
ggggaatgctctgtag

SEQ ID NO: 10069 - DNA, 16 bp, Homo sapiens
ctaatattccctgttc

SEQ ID NO: 10070 - DNA, 16 bp, Homo sapiens
tcggatctccttaagc

SEQ ID NO: 10071 - DNA, 16 bp, Homo sapiens
tgggactgttagataa

SEQ ID NO: 10072 - DNA, 16 bp, Homo sapiens
cccttgacaccatcct

SEQ ID NO: 10073 - DNA, 16 bp, Homo sapiens
gcagatagaactttgg

SEQ ID NO: 10074 - DNA, 16 bp, Homo sapiens
catttacccagaagac

SEQ ID NO: 10075 - DNA, 16 bp, Homo sapiens
gccgagtttgaagtgt

SEQ ID NO: 10076 - DNA, 16 bp, Homo sapiens
ttgctaggcccggagc

SEQ ID NO: 10077 - DNA, 16 bp, Homo sapiens
cgagttaaatattctg

SEQ ID NO: 10078 - DNA, 16 bp, Homo sapiens
cgatgtcttattctgt

SEQ ID NO: 10079 - DNA, 20 bp, Homo sapiens
aaggtggaaatgaagaaagt

SEQ ID NO: 10080 - DNA, 16 bp, Homo sapiens
aaaagaccggaaagac

SEQ ID NO: 10081 - DNA, 16 bp, Homo sapiens
ttcccggccatattaa

SEQ ID NO: 10082 - DNA, 20 bp, Homo sapiens
tgagtaattttagaagcatt

SEQ ID NO: 10083 - DNA, 16 bp, Homo sapiens
gcctgttgaatatagt

SEQ ID NO: 10084 - DNA, 15 bp, Homo sapiens
tcttaaaggaaagta

SEQ ID NO: 10085 - DNA, 16 bp, Homo sapiens
ctatattgctgtagct

SEQ ID NO: 10086 - DNA, 20 bp, Homo sapiens
cctgtagtgagaaactgatt

SEQ ID NO: 10087 - DNA, 18 bp, Homo sapiens
agcgacaagatcatctac

SEQ ID NO: 10088 - DNA, 20 bp, Homo sapiens
tgtatggcacttattatgag

SEQ ID NO: 10089 - DNA, 16 bp, Homo sapiens
tcccaccaatatgatg

SEQ ID NO: 10090 - DNA, 16 bp, Homo sapiens
cctctcaaaaacccac

SEQ ID NO: 10091 - DNA, 14 bp, Homo sapiens
tgcctttgtgactg

SEQ ID NO: 10092 - DNA, 16 bp, Homo sapiens
aggtgtacatagtcct

SEQ ID NO: 10093 - DNA, 16 bp, Homo sapiens
ggccttctataagtgc

SEQ ID NO: 10094 - DNA, 16 bp, Homo sapiens
tgtctgcggtgcacca

SEQ ID NO: 10095 - DNA, 16 bp, Homo sapiens
tgcctccctgatgggt

SEQ ID NO: 10096 - DNA, 16 bp, Homo sapiens
tacagttaggcagtgt

SEQ ID NO: 10097 - DNA, 22 bp, Homo sapiens
acaagaacaccttcagaaccgg

SEQ ID NO: 10098 - DNA, 16 bp, Homo sapiens
ggccacggtcataaaa

SEQ ID NO: 10099 - DNA, 16 bp, Homo sapiens
gaagaccgaggtaaga

SEQ ID NO: 10100 - DNA, 16 bp, Homo sapiens
cgccgcgggcctggtt

SEQ ID NO: 10101 - DNA, 18 bp, Homo sapiens
ttgttattgtgtattatg

SEQ ID NO: 10102 - DNA, 16 bp, Homo sapiens
aacaagtccatccgcg

SEQ ID NO: 10103 - DNA, 17 bp, Homo sapiens
cataaagtctagaaaat

SEQ ID NO: 10104 - DNA, 16 bp, Homo sapiens
gtccagccatcttctg

SEQ ID NO: 10105 - DNA, 20 bp, Homo sapiens
ttgggcaaaggtggaaatga

SEQ ID NO: 10106 - DNA, 16 bp, Homo sapiens
actgactcaggtgctc

SEQ ID NO: 10107 - DNA, 16 bp, Homo sapiens
cagcatcaccttaatc

SEQ ID NO: 10108 - DNA, 14 bp, Homo sapiens
accagaattccagc

SEQ ID NO: 10109 - DNA, 14 bp, Homo sapiens
gcttctgggtgtca

SEQ ID NO: 10110 - DNA, 16 bp, Homo sapiens
gcgttgacccattgtc

SEQ ID NO: 10111 - DNA, 16 bp, Homo sapiens
aggaaacacatcatct

SEQ ID NO: 10112 - DNA, 16 bp, Homo sapiens
ccgctccctatcctac

SEQ ID NO: 10113 - DNA, 16 bp, Homo sapiens
ctcctcactttcgtcc

SEQ ID NO: 10114 - DNA, 15 bp, Homo sapiens
aaatccagaggctag

SEQ ID NO: 10115 - DNA, 16 bp, Homo sapiens
cacttgccgccttcgt

SEQ ID NO: 10116 - DNA, 24 bp, Homo sapiens
tcagtggctaacagaagctgaaca

SEQ ID NO: 10117 - DNA, 20 bp, Homo sapiens
acggggtgctggtttgcgtc

SEQ ID NO: 10118 - DNA, 16 bp, Homo sapiens
cggttcaggaatcgtc

SEQ ID NO: 10119 - DNA, 16 bp, Homo sapiens
caagtgcacaattaac

SEQ ID NO: 10120 - DNA, 16 bp, Homo sapiens
aaaaaaggctgtatgc

SEQ ID NO: 10121 - DNA, 16 bp, Homo sapiens
tgcctgctgggtgata

SEQ ID NO: 10122 - DNA, 16 bp, Homo sapiens
gaccagattcttctgc

SEQ ID NO: 10123 - DNA, 20 bp, Homo sapiens
ggtggatatgtctgggttga

SEQ ID NO: 10124 - DNA, 18 bp, Homo sapiens
acctgaccgacgttgacc

SEQ ID NO: 10125 - DNA, 16 bp, Homo sapiens
gaccgtgaggccgagc

SEQ ID NO: 10126 - DNA, 19 bp, Homo sapiens
cagcaggctgtaccagtgc

SEQ ID NO: 10127 - DNA, 16 bp, Homo sapiens
tcgctgttttctagca

SEQ ID NO: 10128 - DNA, 16 bp, Homo sapiens
agtggtcaccatttga

SEQ ID NO: 10129 - DNA, 16 bp, Homo sapiens
ggtggtgccgctggta

SEQ ID NO: 10130 - DNA, 16 bp, Homo sapiens
gaaacacatcatctgt

SEQ ID NO: 10131 - DNA, 16 bp, Homo sapiens
cctgctcgactaggcc

SEQ ID NO: 10132 - DNA, 16 bp, Homo sapiens
ccggtgtccagcatac

SEQ ID NO: 10133 - DNA, 16 bp, Homo sapiens
agttagatatagttaa

SEQ ID NO: 10134 - DNA, 20 bp, Homo sapiens
tgcagggcatcatcaatttc

SEQ ID NO: 10135 - DNA, 20 bp, Homo sapiens
atgatatgtttactaaagga

SEQ ID NO: 10136 - DNA, 12 bp, Homo sapiens
agggaacaacaa

SEQ ID NO: 10137 - DNA, 16 bp, Homo sapiens
ggcttgatttatctgt

SEQ ID NO: 10138 - DNA, 16 bp, Homo sapiens
gaaaggcaccaattgt

SEQ ID NO: 10139 - DNA, 16 bp, Homo sapiens
gcgcccagttttgatt

SEQ ID NO: 10140 - DNA, 16 bp, Homo sapiens
actcagatctatagag

SEQ ID NO: 10141 - DNA, 16 bp, Homo sapiens
agagccacacatatgg

SEQ ID NO: 10142 - DNA, 16 bp, Homo sapiens
gtagggggccctcttg

SEQ ID NO: 10143 - DNA, 16 bp, Homo sapiens
cctgctgtccatatcc

SEQ ID NO: 10144 - DNA, 25 bp, Homo sapiens
gaacaccttcagaaccggaggcaac

SEQ ID NO: 10145 - DNA, 16 bp, Homo sapiens
gcaaagtaacccttac

SEQ ID NO: 10146 - DNA, 16 bp, Homo sapiens
ccctatgctgggacca

SEQ ID NO: 10147 - DNA, 16 bp, Homo sapiens
gacagcggccctgcct

SEQ ID NO: 10148 - DNA, 16 bp, Homo sapiens
cgggcggggagcaacg

SEQ ID NO: 10149 - DNA, 16 bp, Homo sapiens
tcaagaacgggtccgg

SEQ ID NO: 10150 - DNA, 16 bp, Homo sapiens
agtaccagatcaagga

SEQ ID NO: 10151 - DNA, 16 bp, Homo sapiens
gtctgatgtctaagac

SEQ ID NO: 10152 - DNA, 16 bp, Homo sapiens
gtaccagtaagctcag

SEQ ID NO: 10153 - DNA, 12 bp, Homo sapiens
atccagaggcta

SEQ ID NO: 10154 - DNA, 16 bp, Homo sapiens
ggaggctgtaaagtga

SEQ ID NO: 10155 - DNA, 20 bp, Homo sapiens
tttaaagtacctgtagtgag

SEQ ID NO: 10156 - DNA, 16 bp, Homo sapiens
gtgattaaggtattgt

SEQ ID NO: 10157 - DNA, 16 bp, Homo sapiens
acttggcattcgaggc

SEQ ID NO: 10158 - DNA, 21 bp, Homo sapiens
tggaacagaggcgtccccagt

SEQ ID NO: 10159 - DNA, 16 bp, Homo sapiens
ctctgatgcggtccag

SEQ ID NO: 10160 - DNA, 16 bp, Homo sapiens
gccactgggtaataca

SEQ ID NO: 10161 - DNA, 16 bp, Homo sapiens
gtggctaagtgattaa

SEQ ID NO: 10162 - DNA, 16 bp, Homo sapiens
ccgggtatcaccaagg

SEQ ID NO: 10163 - DNA, 16 bp, Homo sapiens
agatcaggtggacact

SEQ ID NO: 10164 - DNA, 16 bp, Homo sapiens
gtagcaaacattagag

SEQ ID NO: 10165 - DNA, 20 bp, Homo sapiens
gatatgactgtgaggtgaac

SEQ ID NO: 10166 - DNA, 16 bp, Homo sapiens
agcagttaggatgaca

SEQ ID NO: 10167 - DNA, 16 bp, Homo sapiens
gccagaacccataggg

SEQ ID NO: 10168 - DNA, 16 bp, Homo sapiens
gctcgggtcgggtgtc

SEQ ID NO: 10169 - DNA, 15 bp, Homo sapiens
acacaaggtaagtct

SEQ ID NO: 10170 - DNA, 16 bp, Homo sapiens
cctatttggcttgcga

SEQ ID NO: 10171 - DNA, 16 bp, Homo sapiens
cctggcctatcgttct

SEQ ID NO: 10172 - DNA, 16 bp, Homo sapiens
tggatgtgtggttgcc

SEQ ID NO: 10173 - DNA, 18 bp, Homo sapiens
gagcatcagtacgtcagt

SEQ ID NO: 10174 - DNA, 15 bp, Homo sapiens
tgattggaatccagt

SEQ ID NO: 10175 - DNA, 16 bp, Homo sapiens
aggagggcccataaca

SEQ ID NO: 10176 - DNA, 16 bp, Homo sapiens
gaacgggaggggagaa

SEQ ID NO: 10177 - DNA, 16 bp, Homo sapiens
tggagtgaatttcact

SEQ ID NO: 10178 - DNA, 16 bp, Homo sapiens
cagatgtggctaagtg

SEQ ID NO: 10179 - DNA, 17 bp, Homo sapiens
agggtgatggtgggtga

SEQ ID NO: 10180 - DNA, 16 bp, Homo sapiens
tacctgtggctgctca

SEQ ID NO: 10181 - DNA, 16 bp, Homo sapiens
cgtagcaaattgttgt

SEQ ID NO: 10182 - DNA, 16 bp, Homo sapiens
gaattgccacaggtca

SEQ ID NO: 10183 - DNA, 16 bp, Homo sapiens
ggggaggattttggat

SEQ ID NO: 10184 - DNA, 18 bp, Homo sapiens
ctcagaaaggaaataatt

SEQ ID NO: 10185 - DNA, 16 bp, Homo sapiens
gtttttctatctgcga

SEQ ID NO: 10186 - DNA, 16 bp, Homo sapiens
aatcaatacagttagg

SEQ ID NO: 10187 - DNA, 20 bp, Homo sapiens
accaattactgcttccgcaa

SEQ ID NO: 10188 - DNA, 20 bp, Homo sapiens
ctgaaagccttggagggttt

SEQ ID NO: 10189 - DNA, 18 bp, Homo sapiens
attcctgagaattgggaa

SEQ ID NO: 10190 - DNA, 12 bp, Homo sapiens
acaggagggctg

SEQ ID NO: 10191 - DNA, 16 bp, Homo sapiens
tggaggaactactttg

SEQ ID NO: 10192 - DNA, 15 bp, Homo sapiens
atccagaggctagca

SEQ ID NO: 10193 - DNA, 16 bp, Homo sapiens
gaaatgtacttgattc

SEQ ID NO: 10194 - DNA, 16 bp, Homo sapiens
ggcttgggctatgtgg

SEQ ID NO: 10195 - DNA, 16 bp, Homo sapiens
gaggctatgattgttc

SEQ ID NO: 10196 - DNA, 16 bp, Homo sapiens
ggggatcccagcggtt

SEQ ID NO: 10197 - DNA, 16 bp, Homo sapiens
catcatcaacaagtcc

SEQ ID NO: 10198 - DNA, 14 bp, Homo sapiens
accgccaagtccag

SEQ ID NO: 10199 - DNA, 16 bp, Homo sapiens
gcagagctgcagggcc

SEQ ID NO: 10200 - DNA, 20 bp, Homo sapiens
agccattaggggacagatct

SEQ ID NO: 10201 - DNA, 20 bp, Homo sapiens
caagcctgtgaataaaaacc

SEQ ID NO: 10202 - DNA, 16 bp, Homo sapiens
gttctcctgtctggga

SEQ ID NO: 10203 - DNA, 25 bp, Homo sapiens
caccttcagaaccggaggcaacagt

SEQ ID NO: 10204 - DNA, 16 bp, Homo sapiens
ggaaacacatcatctg

SEQ ID NO: 10205 - DNA, 20 bp, Homo sapiens
tgaagagaggtaacaagatg

SEQ ID NO: 10206 - DNA, 18 bp, Homo sapiens
tagcacttgaccttttcg

SEQ ID NO: 10207 - DNA, 16 bp, Homo sapiens
gacccttgtcatttag

SEQ ID NO: 10208 - DNA, 16 bp, Homo sapiens
gtggcgcatgctacac

SEQ ID NO: 10209 - DNA, 20 bp, Homo sapiens
accttcagaaccggaggcaa

SEQ ID NO: 10210 - DNA, 18 bp, Homo sapiens
tctctggatggcaggctg

SEQ ID NO: 10211 - DNA, 20 bp, Homo sapiens
ccaaagccacttcgaagtag

SEQ ID NO: 10212 - DNA, 18 bp, Homo sapiens
ctcctactcagactgtta

SEQ ID NO: 10213 - DNA, 16 bp, Homo sapiens
tagtgttcataattgg

SEQ ID NO: 10214 - DNA, 16 bp, Homo sapiens
cctacctatactcctc

SEQ ID NO: 10215 - DNA, 12 bp, Homo sapiens
tgtgtcagattg

SEQ ID NO: 10216 - DNA, 20 bp, Homo sapiens
ttggatcaagttaactgagc

SEQ ID NO: 10217 - DNA, 16 bp, Homo sapiens
gaacttgaccctcatc

SEQ ID NO: 10218 - DNA, 16 bp, Homo sapiens
atttttcccttgagcg

SEQ ID NO: 10219 - DNA, 16 bp, Homo sapiens
catcaataactttcct

SEQ ID NO: 10220 - DNA, 16 bp, Homo sapiens
aaggacatccgtgcag

SEQ ID NO: 10221 - DNA, 18 bp, Homo sapiens
gcggaatgcctcagtgac

SEQ ID NO: 10222 - DNA, 16 bp, Homo sapiens
aggtctcctgaaatgg

SEQ ID NO: 10223 - DNA, 16 bp, Homo sapiens
ctcaacccattttgta

SEQ ID NO: 10224 - DNA, 16 bp, Homo sapiens
tgtgtacggtgatgag

SEQ ID NO: 10225 - DNA, 12 bp, Homo sapiens
gcagtcaccctg

SEQ ID NO: 10226 - DNA, 18 bp, Homo sapiens
tttatttcaccatatcca

SEQ ID NO: 10227 - DNA, 16 bp, Homo sapiens
ggggatgcccatcaca

SEQ ID NO: 10228 - DNA, 16 bp, Homo sapiens
agctactgcacttcac

SEQ ID NO: 10229 - DNA, 16 bp, Homo sapiens
ggtgtacatagtcctt

SEQ ID NO: 10230 - DNA, 15 bp, Homo sapiens
aaagtctagaaaatt

SEQ ID NO: 10231 - DNA, 16 bp, Homo sapiens
ccagagggaaatggtt

SEQ ID NO: 10232 - DNA, 16 bp, Homo sapiens
gtggtgatatgattgt

SEQ ID NO: 10233 - DNA, 20 bp, Homo sapiens
cagatttagacttggagatg

SEQ ID NO: 10234 - DNA, 30 bp, Homo sapiens
gctagtatcccacttgaacctggaaaagag

SEQ ID NO: 10235 - DNA, 16 bp, Homo sapiens
aaggcttacattgtac

SEQ ID NO: 10236 - DNA, 16 bp, Homo sapiens
acctggttatccagga

SEQ ID NO: 10237 - DNA, 16 bp, Homo sapiens
aggtgtcatggacatg

SEQ ID NO: 10238 - DNA, 16 bp, Homo sapiens
cgacagcaatgtctgg

SEQ ID NO: 10239 - DNA, 16 bp, Homo sapiens
gcagcctccttctcgg

SEQ ID NO: 10240 - DNA, 16 bp, Homo sapiens
cgtgtgccacatgtgc

SEQ ID NO: 10241 - DNA, 25 bp, Homo sapiens
aaactagaaatgccatcttccttga

SEQ ID NO: 10242 - DNA, 16 bp, Homo sapiens
atatcaacttcccatt

SEQ ID NO: 10243 - DNA, 16 bp, Homo sapiens
gtatactactattaag

SEQ ID NO: 10244 - DNA, 20 bp, Homo sapiens
tgtgaataaaaaccctgtat

SEQ ID NO: 10245 - DNA, 16 bp, Homo sapiens
gataagaagccctata

SEQ ID NO: 10246 - DNA, 16 bp, Homo sapiens
ccgggccggccttgcc

SEQ ID NO: 10247 - DNA, 16 bp, Homo sapiens
ggtgccttccattggc

SEQ ID NO: 10248 - DNA, 16 bp, Homo sapiens
ggaaagcacagttggg

SEQ ID NO: 10249 - DNA, 14 bp, Homo sapiens
gcctgcctctactc

SEQ ID NO: 10250 - DNA, 16 bp, Homo sapiens
tgacctcaccttggca

SEQ ID NO: 10251 - DNA, 16 bp, Homo sapiens
tgaggtcagttattgg

SEQ ID NO: 10252 - DNA, 20 bp, Homo sapiens
gggtgaccttgaggatatca

SEQ ID NO: 10253 - DNA, 16 bp, Homo sapiens
catagctcttctaggc

SEQ ID NO: 10254 - DNA, 20 bp, Homo sapiens
ggttggaggaagcagataac

SEQ ID NO: 10255 - DNA, 16 bp, Homo sapiens
agcctcgtcattgtgt

SEQ ID NO: 10256 - DNA, 16 bp, Homo sapiens
aggagctaatcaatac

SEQ ID NO: 10257 - DNA, 16 bp, Homo sapiens
tattttagtattgacg

SEQ ID NO: 10258 - DNA, 16 bp, Homo sapiens
caagcatggtgtcaac

SEQ ID NO: 10259 - DNA, 14 bp, Homo sapiens
ggacattcagaaca

SEQ ID NO: 10260 - DNA, 14 bp, Homo sapiens
tgcgaagcagactg

SEQ ID NO: 10261 - DNA, 17 bp, Homo sapiens
tggtgatgacaatttat

SEQ ID NO: 10262 - DNA, 15 bp, Homo sapiens
cccagtccacaggta

SEQ ID NO: 10263 - DNA, 18 bp, Homo sapiens
ggatggcattgggcagcg

SEQ ID NO: 10264 - DNA, 16 bp, Homo sapiens
tcaggggagcttggga

SEQ ID NO: 10265 - DNA, 16 bp, Homo sapiens
aaacagtccaaacagg

SEQ ID NO: 10266 - DNA, 16 bp, Homo sapiens
ggctcaggtgcttgca

SEQ ID NO: 10267 - DNA, 18 bp, Homo sapiens
acaccttcagaaccggag

SEQ ID NO: 10268 - DNA, 16 bp, Homo sapiens
ccatctctatacttga

SEQ ID NO: 10269 - DNA, 16 bp, Homo sapiens
gccatgtgcattcgca

SEQ ID NO: 10270 - DNA, 16 bp, Homo sapiens
gatcattgtgtattag

SEQ ID NO: 10271 - DNA, 16 bp, Homo sapiens
ggccttgccctattcc

SEQ ID NO: 10272 - DNA, 20 bp, Homo sapiens
tctatagtcactttgccagc

SEQ ID NO: 10273 - DNA, 16 bp, Homo sapiens
ataagaagccctataa

SEQ ID NO: 10274 - DNA, 12 bp, Homo sapiens
cccggccaccca

SEQ ID NO: 10275 - DNA, 19 bp, Homo sapiens
cacggtgggccaaaggatg

SEQ ID NO: 10276 - DNA, 18 bp, Homo sapiens
aacctgagccacaatgaa

SEQ ID NO: 10277 - DNA, 16 bp, Homo sapiens
cctccatggccaccgg

SEQ ID NO: 10278 - DNA, 16 bp, Homo sapiens
actccagaccttgggg

SEQ ID NO: 10279 - DNA, 20 bp, Homo sapiens
aagtaaggaccagagacaaa

SEQ ID NO: 10280 - DNA, 14 bp, Homo sapiens
agatgggatacctc

SEQ ID NO: 10281 - DNA, 16 bp, Homo sapiens
gggcttgggctatgtg

SEQ ID NO: 10282 - DNA, 16 bp, Homo sapiens
gacctcatgtatttgt

SEQ ID NO: 10283 - DNA, 20 bp, Homo sapiens
gccacaattgcacaatatat

SEQ ID NO: 10284 - DNA, 16 bp, Homo sapiens
tcaggtggacactctg

SEQ ID NO: 10285 - DNA, 16 bp, Homo sapiens
ttccattcacttcgtg

SEQ ID NO: 10286 - DNA, 20 bp, Homo sapiens
ttataaaatcacagagggtg

SEQ ID NO: 10287 - DNA, 16 bp, Homo sapiens
tgggtgaccaatggct

SEQ ID NO: 10288 - DNA, 16 bp, Homo sapiens
atgccacacatataac

SEQ ID NO: 10289 - DNA, 15 bp, Homo sapiens
ggtatatggttaatt

SEQ ID NO: 10290 - DNA, 16 bp, Homo sapiens
ccagcctgggtcatta

SEQ ID NO: 10291 - DNA, 16 bp, Homo sapiens
cgcaccctctgtgttg

SEQ ID NO: 10292 - DNA, 16 bp, Homo sapiens
aaccttggtatactac

SEQ ID NO: 10293 - DNA, 20 bp, Homo sapiens
agatgacttgggcaaaggtg

SEQ ID NO: 10294 - DNA, 16 bp, Homo sapiens
ccaatcgcataaatct

SEQ ID NO: 10295 - DNA, 16 bp, Homo sapiens
ccggcccaccattatc

SEQ ID NO: 10296 - DNA, 20 bp, Homo sapiens
aaggactgactgaaggcctg

SEQ ID NO: 10297 - DNA, 14 bp, Homo sapiens
tggcaccacaaagt

SEQ ID NO: 10298 - DNA, 16 bp, Homo sapiens
ggtcgtcaagctgaaa

SEQ ID NO: 10299 - DNA, 20 bp, Homo sapiens
gatgaccatggccgtggaga

SEQ ID NO: 10300 - DNA, 20 bp, Homo sapiens
aacctgatgctttaactttg

SEQ ID NO: 10301 - DNA, 16 bp, Homo sapiens
gctcagtttggtgtca

SEQ ID NO: 10302 - DNA, 16 bp, Homo sapiens
cggacttggcattcga

SEQ ID NO: 10303 - DNA, 21 bp, Homo sapiens
gaaagacacaaattcctgaga

SEQ ID NO: 10304 - DNA, 16 bp, Homo sapiens
tgctccatctatataa

SEQ ID NO: 10305 - DNA, 16 bp, Homo sapiens
tgttgaaaccagagct

SEQ ID NO: 10306 - DNA, 16 bp, Homo sapiens
aggccgtgcagtggtg

SEQ ID NO: 10307 - DNA, 16 bp, Homo sapiens
ggattgccaactacaa

SEQ ID NO: 10308 - DNA, 14 bp, Homo sapiens
caggtagtactggg

SEQ ID NO: 10309 - DNA, 16 bp, Homo sapiens
gagccttgtggtctgt

SEQ ID NO: 10310 - DNA, 16 bp, Homo sapiens
atgcccgtatattttt

SEQ ID NO: 10311 - DNA, 16 bp, Homo sapiens
gaagcccggcttctgt

SEQ ID NO: 10312 - DNA, 16 bp, Homo sapiens
gaattacggtaataga

SEQ ID NO: 10313 - DNA, 20 bp, Homo sapiens
aatacagcaggtgggtgttg

SEQ ID NO: 10314 - DNA, 16 bp, Homo sapiens
cagacaaccgactatc

SEQ ID NO: 10315 - DNA, 16 bp, Homo sapiens
acccttgacaccatcc

SEQ ID NO: 10316 - DNA, 16 bp, Homo sapiens
ggcatgtgcgattgct

SEQ ID NO: 10317 - DNA, 18 bp, Homo sapiens
ctctccacggtagcactt

SEQ ID NO: 10318 - DNA, 14 bp, Homo sapiens
ctggacctgcacca

SEQ ID NO: 10319 - DNA, 16 bp, Homo sapiens
gcgggcgaggagcgca

SEQ ID NO: 10320 - DNA, 16 bp, Homo sapiens
tgcacaagacctgtta

SEQ ID NO: 10321 - DNA, 14 bp, Homo sapiens
ctctgaaggtgatc

SEQ ID NO: 10322 - DNA, 14 bp, Homo sapiens
gcaatgtggcaaca

SEQ ID NO: 10323 - DNA, 20 bp, Homo sapiens
aagagaggcatgttggagac

SEQ ID NO: 10324 - DNA, 15 bp, Homo sapiens
gcattgggcagcggc

SEQ ID NO: 10325 - DNA, 20 bp, Homo sapiens
gggcaaaggtggaaatgaag

SEQ ID NO: 10326 - DNA, 18 bp, Homo sapiens
tgatgctttggtgaagaa

SEQ ID NO: 10327 - DNA, 16 bp, Homo sapiens
tttgaccactgtaagt

SEQ ID NO: 10328 - DNA, 16 bp, Homo sapiens
gtggctgttggtggaa

SEQ ID NO: 10329 - DNA, 16 bp, Homo sapiens
ccagattaatccttta

SEQ ID NO: 10330 - DNA, 16 bp, Homo sapiens
ggtatgccctctcgct

SEQ ID NO: 10331 - DNA, 16 bp, Homo sapiens
caccacttacatccgg

SEQ ID NO: 10332 - DNA, 16 bp, Homo sapiens
agcaggcgagttgatg

SEQ ID NO: 10333 - DNA, 20 bp, Homo sapiens
ggtgctgatttgtgaaccca

SEQ ID NO: 10334 - DNA, 16 bp, Homo sapiens
ttcccattagcaggag

SEQ ID NO: 10335 - DNA, 16 bp, Homo sapiens
gatgggctcatataca

SEQ ID NO: 10336 - DNA, 20 bp, Homo sapiens
tttagaagcctggctacaat

SEQ ID NO: 10337 - DNA, 16 bp, Homo sapiens
aggcctgaacttgtgg

SEQ ID NO: 10338 - DNA, 16 bp, Homo sapiens
cccactcctcgctcag

SEQ ID NO: 10339 - DNA, 16 bp, Homo sapiens
aacccttgacaccatc

SEQ ID NO: 10340 - DNA, 18 bp, Homo sapiens
gaaggaagtcatcgtggc

SEQ ID NO: 10341 - DNA, 16 bp, Homo sapiens
ccatgacttggttggt

SEQ ID NO: 10342 - DNA, 16 bp, Homo sapiens
ttgcgccgagcctgga

SEQ ID NO: 10343 - DNA, 16 bp, Homo sapiens
gaaaccaccactcttc

SEQ ID NO: 10344 - DNA, 16 bp, Homo sapiens
agcatttgtgatctcg

SEQ ID NO: 10345 - DNA, 16 bp, Homo sapiens
cggagacatatacggt

SEQ ID NO: 10346 - DNA, 16 bp, Homo sapiens
ggtcgttgagggtcgg

SEQ ID NO: 10347 - DNA, 16 bp, Homo sapiens
agcaggtcgtcaagct

SEQ ID NO: 10348 - DNA, 20 bp, Homo sapiens
tgggcaaaggtggaaatgaa

SEQ ID NO: 10349 - DNA, 16 bp, Homo sapiens
gcggttcccatttgag

SEQ ID NO: 10350 - DNA, 20 bp, Homo sapiens
gatggtgggtgaccttgagg

SEQ ID NO: 10351 - DNA, 16 bp, Homo sapiens
gaaccttatagaaaca

SEQ ID NO: 10352 - DNA, 16 bp, Homo sapiens
gccttgccctattcct

SEQ ID NO: 10353 - DNA, 16 bp, Homo sapiens
ctgcgacagcaatgtc

SEQ ID NO: 10354 - DNA, 18 bp, Homo sapiens
gggacgaactggtgtaat

SEQ ID NO: 10355 - DNA, 16 bp, Homo sapiens
caggtggacactctgg

SEQ ID NO: 10356 - DNA, 16 bp, Homo sapiens
agttagttagctgggc

SEQ ID NO: 10357 - DNA, 14 bp, Homo sapiens
gcttcaaccctgag

SEQ ID NO: 10358 - DNA, 16 bp, Homo sapiens
acccgcaaaaccaaag

SEQ ID NO: 10359 - DNA, 16 bp, Homo sapiens
tggcctcttccttaac

SEQ ID NO: 10360 - DNA, 20 bp, Homo sapiens
tggggaagcattaaaggact

SEQ ID NO: 10361 - DNA, 16 bp, Homo sapiens
catgctgacagctgca

SEQ ID NO: 10362 - DNA, 16 bp, Homo sapiens
atataacaggattggc

SEQ ID NO: 10363 - DNA, 16 bp, Homo sapiens
ttaaacagctctgtcg

SEQ ID NO: 10364 - DNA, 18 bp, Homo sapiens
gtccatttcagctcccag

SEQ ID NO: 10365 - DNA, 16 bp, Homo sapiens
aaatgaacacattgcg

SEQ ID NO: 10366 - DNA, 20 bp, Homo sapiens
tctgtttcaatgacctgtat

SEQ ID NO: 10367 - DNA, 25 bp, Homo sapiens
tgaagtacaagaacaccttcagaac

SEQ ID NO: 10368 - DNA, 20 bp, Homo sapiens
tgttaagtaggataagttct

SEQ ID NO: 10369 - DNA, 20 bp, Homo sapiens
tcaatttatgaatattatca

SEQ ID NO: 10370 - DNA, 18 bp, Homo sapiens
atctccaaacagccctta

SEQ ID NO: 10371 - DNA, 16 bp, Homo sapiens
ttggtcctggtttggt

SEQ ID NO: 10372 - DNA, 16 bp, Homo sapiens
gtgtaagagataaggt

SEQ ID NO: 10373 - DNA, 20 bp, Homo sapiens
tagtgagaaactgatttatg

SEQ ID NO: 10374 - DNA, 20 bp, Homo sapiens
aaaagaggtggatatgtctg

SEQ ID NO: 10375 - DNA, 16 bp, Homo sapiens
tgggtctggatatcca

SEQ ID NO: 10376 - DNA, 16 bp, Homo sapiens
ggatattggttgtttc

SEQ ID NO: 10377 - DNA, 12 bp, Homo sapiens
tattctgacacc

SEQ ID NO: 10378 - DNA, 16 bp, Homo sapiens
tgcactctgtattcta

SEQ ID NO: 10379 - DNA, 16 bp, Homo sapiens
tccgtgtgaattcttc

SEQ ID NO: 10380 - DNA, 16 bp, Homo sapiens
cagatcccatctcggc

SEQ ID NO: 10381 - DNA, 19 bp, Homo sapiens
caaaggatgaagagaggca

SEQ ID NO: 10382 - DNA, 16 bp, Homo sapiens
agaactttcggcccga

SEQ ID NO: 10383 - DNA, 16 bp, Homo sapiens
gcttagccatgctgcc

SEQ ID NO: 10384 - DNA, 16 bp, Homo sapiens
gtattttactcttggg

SEQ ID NO: 10385 - DNA, 16 bp, Homo sapiens
tacagcctgttatgat

SEQ ID NO: 10386 - DNA, 12 bp, Homo sapiens
ggattaaattgc

SEQ ID NO: 10387 - DNA, 25 bp, Homo sapiens
agcctgtaagtatactggatcccat

SEQ ID NO: 10388 - DNA, 18 bp, Homo sapiens
gtagattctgcttgggtt

SEQ ID NO: 10389 - DNA, 20 bp, Homo sapiens
ggtgacatgatttacatttc

SEQ ID NO: 10390 - DNA, 16 bp, Homo sapiens
atcttgccctcttgtg

SEQ ID NO: 10391 - DNA, 16 bp, Homo sapiens
gtgggcttatctgttg

SEQ ID NO: 10392 - DNA, 16 bp, Homo sapiens
ctcgagacccatttgt

SEQ ID NO: 10393 - DNA, 16 bp, Homo sapiens
gaacccttgacaccat

SEQ ID NO: 10394 - DNA, 20 bp, Homo sapiens
cgacctgaagattgaagtga

SEQ ID NO: 10395 - DNA, 16 bp, Homo sapiens
atctagatatctattg

SEQ ID NO: 10396 - DNA, 16 bp, Homo sapiens
tggacattgaattcac

SEQ ID NO: 10397 - DNA, 19 bp, Homo sapiens
gaagtccatcttaatgtac

SEQ ID NO: 10398 - DNA, 16 bp, Homo sapiens
actgtatgcattgcct

SEQ ID NO: 10399 - DNA, 16 bp, Homo sapiens
ggggccctcctttgga

SEQ ID NO: 10400 - DNA, 16 bp, Homo sapiens
gataccaagcctagca

SEQ ID NO: 10401 - DNA, 16 bp, Homo sapiens
tgtgggctcctgccga

SEQ ID NO: 10402 - DNA, 16 bp, Homo sapiens
ggctcactgcatgtgt

SEQ ID NO: 10403 - DNA, 16 bp, Homo sapiens
ccacacaacctcatcc

SEQ ID NO: 10404 - DNA, 16 bp, Homo sapiens
cgggtgtcgcctgaga

SEQ ID NO: 10405 - DNA, 14 bp, Homo sapiens
cctgtaagagaaat

SEQ ID NO: 10406 - DNA, 20 bp, Homo sapiens
tctttgtcattcaagcctgt

SEQ ID NO: 10407 - DNA, 16 bp, Homo sapiens
gccaccttgcattggc

SEQ ID NO: 10408 - DNA, 16 bp, Homo sapiens
ccctgctatatttagt

SEQ ID NO: 10409 - DNA, 16 bp, Homo sapiens
gcctccacatatatat

SEQ ID NO: 10410 - DNA, 16 bp, Homo sapiens
agcccatgtagggcag

SEQ ID NO: 10411 - DNA, 16 bp, Homo sapiens
attagcaggagctccc

SEQ ID NO: 10412 - DNA, 20 bp, Homo sapiens
ctggattgtggttccatgca

SEQ ID NO: 10413 - DNA, 16 bp, Homo sapiens
acccggcctaggttag

SEQ ID NO: 10414 - DNA, 16 bp, Homo sapiens
gcggttccgtcacctc

SEQ ID NO: 10415 - DNA, 20 bp, Homo sapiens
agcagctgctccacgcccaa

SEQ ID NO: 10416 - DNA, 16 bp, Homo sapiens
gcggcaagcctggccc

SEQ ID NO: 10417 - DNA, 16 bp, Homo sapiens
acctatactcctcggc

SEQ ID NO: 10418 - DNA, 16 bp, Homo sapiens
taagcttcaaatttac

SEQ ID NO: 10419 - DNA, 16 bp, Homo sapiens
cacttgccttagggca

SEQ ID NO: 10420 - DNA, 20 bp, Homo sapiens
tgcgtgctgaagggcgacgg

SEQ ID NO: 10421 - DNA, 18 bp, Homo sapiens
gctacagttattaatctg

SEQ ID NO: 10422 - DNA, 16 bp, Homo sapiens
gttgtccttaataaca

SEQ ID NO: 10423 - DNA, 16 bp, Homo sapiens
cgcccgaatcaatcgc

SEQ ID NO: 10424 - DNA, 18 bp, Homo sapiens
gctcaacaatcgtgtggg

SEQ ID NO: 10425 - DNA, 16 bp, Homo sapiens
gggcagaacaatatga

SEQ ID NO: 10426 - DNA, 16 bp, Homo sapiens
ggacgggctaggacca

SEQ ID NO: 10427 - DNA, 16 bp, Homo sapiens
tcacctcctaaaatcc

SEQ ID NO: 10428 - DNA, 16 bp, Homo sapiens
catgtgcccattcaca

SEQ ID NO: 10429 - DNA, 16 bp, Homo sapiens
cagagttacttattga

SEQ ID NO: 10430 - DNA, 12 bp, Homo sapiens
atcccaagtcct

SEQ ID NO: 10431 - DNA, 16 bp, Homo sapiens
aggttcctgtccttgt

SEQ ID NO: 10432 - DNA, 16 bp, Homo sapiens
taccattcatttgtgg

SEQ ID NO: 10433 - DNA, 16 bp, Homo sapiens
ggcttttggcctgtaa

SEQ ID NO: 10434 - DNA, 16 bp, Homo sapiens
tggggtctgtatgtga

SEQ ID NO: 10435 - DNA, 14 bp, Homo sapiens
gcaattcactgtaa

SEQ ID NO: 10436 - DNA, 16 bp, Homo sapiens
tcttgccgaggcccgg

SEQ ID NO: 10437 - DNA, 16 bp, Homo sapiens
tatgatgcgcatttta

SEQ ID NO: 10438 - DNA, 16 bp, Homo sapiens
agcatgtgttagttcc

SEQ ID NO: 10439 - DNA, 16 bp, Homo sapiens
ggtggatggctaacgg

SEQ ID NO: 10440 - DNA, 16 bp, Homo sapiens
ggcccgggccggcctt

SEQ ID NO: 10441 - DNA, 18 bp, Homo sapiens
gaagaccttttgcggcac

SEQ ID NO: 10442 - DNA, 14 bp, Homo sapiens
tcctggggccgatg

SEQ ID NO: 10443 - DNA, 16 bp, Homo sapiens
tcatgtaataatcctc

SEQ ID NO: 10444 - DNA, 16 bp, Homo sapiens
tgccaacagtgacctc

SEQ ID NO: 10445 - DNA, 20 bp, Homo sapiens
aatgaagaaagtacaaagac

SEQ ID NO: 10446 - DNA, 16 bp, Homo sapiens
aaagttcagaccttgg

SEQ ID NO: 10447 - DNA, 16 bp, Homo sapiens
tcccggccgagatttt

SEQ ID NO: 10448 - DNA, 20 bp, Homo sapiens
gtagtgagaaactgatttat

SEQ ID NO: 10449 - DNA, 16 bp, Homo sapiens
gatacagagcggttcc

SEQ ID NO: 10450 - DNA, 16 bp, Homo sapiens
gtgttgttcgttcatt

SEQ ID NO: 10451 - DNA, 23 bp, Homo sapiens
tgcaacgcctgtggaaagggtga

SEQ ID NO: 10452 - DNA, 16 bp, Homo sapiens
aaagatataacaggat

SEQ ID NO: 10453 - DNA, 16 bp, Homo sapiens
aggtggaaaaacacct

SEQ ID NO: 10454 - DNA, 16 bp, Homo sapiens
tggtcgtgccatcgcc

SEQ ID NO: 10455 - DNA, 24 bp, Homo sapiens
tctacattgacttccgacaggatc

SEQ ID NO: 10456 - DNA, 16 bp, Homo sapiens
gagtaggtagatttca

SEQ ID NO: 10457 - DNA, 16 bp, Homo sapiens
agaacccttgacacca

SEQ ID NO: 10458 - DNA, 16 bp, Homo sapiens
tacagagcggttccgt

SEQ ID NO: 10459 - DNA, 16 bp, Homo sapiens
aaagtgtgccgagaag

SEQ ID NO: 10460 - DNA, 16 bp, Homo sapiens
gaatatgattaatagc

SEQ ID NO: 10461 - DNA, 16 bp, Homo sapiens
tcgggtgtcgcctgag

SEQ ID NO: 10462 - DNA, 16 bp, Homo sapiens
cgcggttcaggaatcg

SEQ ID NO: 10463 - DNA, 16 bp, Homo sapiens
aggagttataatagca

SEQ ID NO: 10464 - DNA, 16 bp, Homo sapiens
tgtgcgtgatgagtgc

SEQ ID NO: 10465 - DNA, 14 bp, Homo sapiens
agctccatgcctgg

SEQ ID NO: 10466 - DNA, 16 bp, Homo sapiens
tgtgtctattaaaacc

SEQ ID NO: 10467 - DNA, 14 bp, Homo sapiens
tcctatccttcctg

SEQ ID NO: 10468 - DNA, 16 bp, Homo sapiens
gaaatactggattcca

SEQ ID NO: 10469 - DNA, 16 bp, Homo sapiens
caggagctaatcaata

SEQ ID NO: 10470 - DNA, 16 bp, Homo sapiens
gcagtttggggtggat

SEQ ID NO: 10471 - DNA, 16 bp, Homo sapiens
ccgatgcttgtaagtt

SEQ ID NO: 10472 - DNA, 16 bp, Homo sapiens
tgagcttatacatgct

SEQ ID NO: 10473 - DNA, 16 bp, Homo sapiens
cctctcccagttgggg

SEQ ID NO: 10474 - DNA, 16 bp, Homo sapiens
ctcgtggtctcagagc

SEQ ID NO: 10475 - DNA, 16 bp, Homo sapiens
ttcggctggggtgaca

SEQ ID NO: 10476 - DNA, 16 bp, Homo sapiens
tctatattgctgtagc

SEQ ID NO: 10477 - DNA, 16 bp, Homo sapiens
tgttcctcagctcctt

SEQ ID NO: 10478 - DNA, 16 bp, Homo sapiens
gccagcctttatcatt

SEQ ID NO: 10479 - DNA, 16 bp, Homo sapiens
gcctcatgttggtttc

SEQ ID NO: 10480 - DNA, 16 bp, Homo sapiens
gcagatctcctctcct

SEQ ID NO: 10481 - DNA, 16 bp, Homo sapiens
gcggcgaccgtgaggc

SEQ ID NO: 10482 - DNA, 16 bp, Homo sapiens
gagaaaactcaaacag

SEQ ID NO: 10483 - DNA, 16 bp, Homo sapiens
ttgtcaagggataatg

SEQ ID NO: 10484 - DNA, 16 bp, Homo sapiens
taatgttgctcttcgc

SEQ ID NO: 10485 - DNA, 12 bp, Homo sapiens
cagtgggaatag

SEQ ID NO: 10486 - DNA, 12 bp, Homo sapiens
tgctggtcattg

SEQ ID NO: 10487 - DNA, 18 bp, Homo sapiens
gtagatggattcacagat

SEQ ID NO: 10488 - DNA, 16 bp, Homo sapiens
cagaggatccctgctt

SEQ ID NO: 10489 - DNA, 20 bp, Homo sapiens
atctttgtataaataaatat

SEQ ID NO: 10490 - DNA, 20 bp, Homo sapiens
tgtcattcaagcctgtgaat

SEQ ID NO: 10491 - DNA, 16 bp, Homo sapiens
catggcttcctcgtga

SEQ ID NO: 10492 - DNA, 20 bp, Homo sapiens
tatttgcgtgtgaggaaact

SEQ ID NO: 10493 - DNA, 14 bp, Homo sapiens
gtgcgaagcagact

SEQ ID NO: 10494 - DNA, 16 bp, Homo sapiens
tggtggtgcatactga

SEQ ID NO: 10495 - DNA, 16 bp, Homo sapiens
ggctgccaccctttac

SEQ ID NO: 10496 - DNA, 16 bp, Homo sapiens
tgccaaaccactgcat

SEQ ID NO: 10497 - DNA, 16 bp, Homo sapiens
gacttggcattcgagg

SEQ ID NO: 10498 - DNA, 16 bp, Homo sapiens
atttaggtcattatcg

SEQ ID NO: 10499 - DNA, 16 bp, Homo sapiens
aatgattgtagtgcta

SEQ ID NO: 10500 - DNA, 16 bp, Homo sapiens
ccgcggttcaggaatc

SEQ ID NO: 10501 - DNA, 20 bp, Homo sapiens
agcctatgaattctaccatg

SEQ ID NO: 10502 - DNA, 16 bp, Homo sapiens
gttcagaccttggttg

SEQ ID NO: 10503 - DNA, 12 bp, Homo sapiens
ggaacaatattg

SEQ ID NO: 10504 - DNA, 16 bp, Homo sapiens
gggaccagaacccttg

SEQ ID NO: 10505 - DNA, 16 bp, Homo sapiens
cttcagtaagttatgg

SEQ ID NO: 10506 - DNA, 16 bp, Homo sapiens
ctcagacagccttgac

SEQ ID NO: 10507 - DNA, 16 bp, Homo sapiens
gcagcccgtgaatggc

SEQ ID NO: 10508 - DNA, 16 bp, Homo sapiens
tacctgcgtagctttt

SEQ ID NO: 10509 - DNA, 16 bp, Homo sapiens
cctgctctgttaatgc

SEQ ID NO: 10510 - DNA, 16 bp, Homo sapiens
gcagaactcagtcact

SEQ ID NO: 10511 - DNA, 16 bp, Homo sapiens
caagattgatttagcc

SEQ ID NO: 10512 - DNA, 16 bp, Homo sapiens
cagagcgaatcgtcac

SEQ ID NO: 10513 - DNA, 14 bp, Homo sapiens
ttccagtgtgctgg

SEQ ID NO: 10514 - DNA, 16 bp, Homo sapiens
ttgagaagccgcggtg

SEQ ID NO: 10515 - DNA, 16 bp, Homo sapiens
gccagatgctttttac

SEQ ID NO: 10516 - DNA, 16 bp, Homo sapiens
gcagatgtcctcattg

SEQ ID NO: 10517 - DNA, 16 bp, Homo sapiens
cccatcaaccttcgag

SEQ ID NO: 10518 - DNA, 18 bp, Homo sapiens
gctgagggcaaagcagcc

SEQ ID NO: 10519 - DNA, 18 bp, Homo sapiens
ggagtccatcatggcgtg

SEQ ID NO: 10520 - DNA, 16 bp, Homo sapiens
agacagagcgaatcgt

SEQ ID NO: 10521 - DNA, 20 bp, Homo sapiens
actcagtttgaactaactgg

SEQ ID NO: 10522 - DNA, 16 bp, Homo sapiens
agaaggccctatgtgc

SEQ ID NO: 10523 - DNA, 16 bp, Homo sapiens
tcccggccatattaac

SEQ ID NO: 10524 - DNA, 16 bp, Homo sapiens
gcctgctgtccataca

SEQ ID NO: 10525 - DNA, 16 bp, Homo sapiens
cccaatattaaaatgc

SEQ ID NO: 10526 - DNA, 12 bp, Homo sapiens
gacttagacttg

SEQ ID NO: 10527 - DNA, 18 bp, Homo sapiens
tcgttggggatggtgcct

SEQ ID NO: 10528 - DNA, 16 bp, Homo sapiens
gtggagtccttaaaca

SEQ ID NO: 10529 - DNA, 16 bp, Homo sapiens
actttcctcgtatttt

SEQ ID NO: 10530 - DNA, 16 bp, Homo sapiens
acatccgtgcagcact

SEQ ID NO: 10531 - DNA, 20 bp, Homo sapiens
gaccaaaactcatcatgata

SEQ ID NO: 10532 - DNA, 16 bp, Homo sapiens
aaactgatcactacaa

SEQ ID NO: 10533 - DNA, 16 bp, Homo sapiens
acatcctcaagtctga

SEQ ID NO: 10534 - DNA, 16 bp, Homo sapiens
tcccacctattccttt

SEQ ID NO: 10535 - DNA, 16 bp, Homo sapiens
attaatttgcctaaca

SEQ ID NO: 10536 - DNA, 16 bp, Homo sapiens
agaggtgcctttgcta

SEQ ID NO: 10537 - DNA, 16 bp, Homo sapiens
ctactctatgctttgg

SEQ ID NO: 10538 - DNA, 16 bp, Homo sapiens
accagatacatttact

SEQ ID NO: 10539 - DNA, 20 bp, Homo sapiens
gaaaacatcagcaagttcat

SEQ ID NO: 10540 - DNA, 16 bp, Homo sapiens
ttaggaatgcttagga

SEQ ID NO: 10541 - DNA, 16 bp, Homo sapiens
aggggccgatacggga

SEQ ID NO: 10542 - DNA, 16 bp, Homo sapiens
gccacctgaattgtgg

SEQ ID NO: 10543 - DNA, 16 bp, Homo sapiens
agtccggcaggagatt

SEQ ID NO: 10544 - DNA, 16 bp, Homo sapiens
cggcggggccttgtgg

SEQ ID NO: 10545 - DNA, 16 bp, Homo sapiens
tccttaaattgttagc

SEQ ID NO: 10546 - DNA, 16 bp, Homo sapiens
ttgtcaaccagttttg

SEQ ID NO: 10547 - DNA, 12 bp, Homo sapiens
ggaactgggcgg

SEQ ID NO: 10548 - DNA, 16 bp, Homo sapiens
ctgcgggcccatgctc

SEQ ID NO: 10549 - DNA, 20 bp, Homo sapiens
atgaatattatcatgctttg

SEQ ID NO: 10550 - DNA, 16 bp, Homo sapiens
accgcactgcgcaaag

SEQ ID NO: 10551 - DNA, 12 bp, Homo sapiens
agtttgtggtct

SEQ ID NO: 10552 - DNA, 16 bp, Homo sapiens
gtcaaccagttttgca

SEQ ID NO: 10553 - DNA, 20 bp, Homo sapiens
cctctctctgtccacttgca

SEQ ID NO: 10554 - DNA, 16 bp, Homo sapiens
agggataagtctgtac

SEQ ID NO: 10555 - DNA, 16 bp, Homo sapiens
taagtgccctagtatc

SEQ ID NO: 10556 - DNA, 16 bp, Homo sapiens
gttacacacttaagcc

SEQ ID NO: 10557 - DNA, 18 bp, Homo sapiens
tacctccagtattagtgc

SEQ ID NO: 10558 - DNA, 16 bp, Homo sapiens
ctgatgggtgggccca

SEQ ID NO: 10559 - DNA, 16 bp, Homo sapiens
atggagttccttaagg

SEQ ID NO: 10560 - DNA, 16 bp, Homo sapiens
cctgagtagcctgatc

SEQ ID NO: 10561 - DNA, 16 bp, Homo sapiens
tcgattcagtgtgcgt

SEQ ID NO: 10562 - DNA, 16 bp, Homo sapiens
ggttgcaaccataccc

SEQ ID NO: 10563 - DNA, 16 bp, Homo sapiens
ccctctccaattatcc

SEQ ID NO: 10564 - DNA, 16 bp, Homo sapiens
gtcgaatagtaattta

SEQ ID NO: 10565 - DNA, 16 bp, Homo sapiens
ctccatggccaccggg

SEQ ID NO: 10566 - DNA, 14 bp, Homo sapiens
tcgacctgtaccac

SEQ ID NO: 10567 - DNA, 16 bp, Homo sapiens
cctcatccctatttgg

SEQ ID NO: 10568 - DNA, 16 bp, Homo sapiens
tctggcctgggcggct

SEQ ID NO: 10569 - DNA, 16 bp, Homo sapiens
ggaggaattagttggc

SEQ ID NO: 10570 - DNA, 12 bp, Homo sapiens
gctggtcattgg

SEQ ID NO: 10571 - DNA, 20 bp, Homo sapiens
ttcctgagccgccacagcat

SEQ ID NO: 10572 - DNA, 16 bp, Homo sapiens
gtggctgctcacttgg

SEQ ID NO: 10573 - DNA, 20 bp, Homo sapiens
catgaagatgcacttgcaaa

SEQ ID NO: 10574 - DNA, 20 bp, Homo sapiens
cccttaactcatctgttatc

SEQ ID NO: 10575 - DNA, 18 bp, Homo sapiens
tggttccagaactcctcc

SEQ ID NO: 10576 - DNA, 16 bp, Homo sapiens
tgtccattagatgagc

SEQ ID NO: 10577 - DNA, 16 bp, Homo sapiens
tgttggggacccggcc

SEQ ID NO: 10578 - DNA, 16 bp, Homo sapiens
tcctcgctcagtttga

SEQ ID NO: 10579 - DNA, 16 bp, Homo sapiens
gccaccaactgtagat

SEQ ID NO: 10580 - DNA, 16 bp, Homo sapiens
tgagtcagggattagc

SEQ ID NO: 10581 - DNA, 18 bp, Homo sapiens
ggacaacgagaaccggat

SEQ ID NO: 10582 - DNA, 16 bp, Homo sapiens
atcatgctgacagctg

SEQ ID NO: 10583 - DNA, 16 bp, Homo sapiens
gtaccagtcgattgac

SEQ ID NO: 10584 - DNA, 16 bp, Homo sapiens
gcagaccaagctggcg

SEQ ID NO: 10585 - DNA, 16 bp, Homo sapiens
cgagcctttaatgtac

SEQ ID NO: 10586 - DNA, 16 bp, Homo sapiens
gtcttcgccatcttca

SEQ ID NO: 10587 - DNA, 14 bp, Homo sapiens
aaggatctgccctg

SEQ ID NO: 10588 - DNA, 16 bp, Homo sapiens
gcgcagtcccttgcat

SEQ ID NO: 10589 - DNA, 16 bp, Homo sapiens
gctctgctatttcgta

SEQ ID NO: 10590 - DNA, 16 bp, Homo sapiens
ttagtggtctttagtc

SEQ ID NO: 10591 - DNA, 16 bp, Homo sapiens
accaacttcatcctgg

SEQ ID NO: 10592 - DNA, 16 bp, Homo sapiens
cgtgtttgccaacagt

SEQ ID NO: 10593 - DNA, 16 bp, Homo sapiens
cgagtaccagatcaag

SEQ ID NO: 10594 - DNA, 16 bp, Homo sapiens
gctggacatttatgat

SEQ ID NO: 10595 - DNA, 18 bp, Homo sapiens
gaaggagtccaagcggat

SEQ ID NO: 10596 - DNA, 30 bp, Homo sapiens
ggatttggaacagaggcgtccccagttgga

SEQ ID NO: 10597 - DNA, 16 bp, Homo sapiens
gactgtatgcattgcc

SEQ ID NO: 10598 - DNA, 16 bp, Homo sapiens
ctataagtctagtaac

SEQ ID NO: 10599 - DNA, 16 bp, Homo sapiens
aggctgtgttatcatc

SEQ ID NO: 10600 - DNA, 16 bp, Homo sapiens
tcaggacattagagcg

SEQ ID NO: 10601 - DNA, 14 bp, Homo sapiens
tattcaacctaggg

SEQ ID NO: 10602 - DNA, 16 bp, Homo sapiens
tgcttgctatgtcact

SEQ ID NO: 10603 - DNA, 16 bp, Homo sapiens
aggctgtccaagtgct

SEQ ID NO: 10604 - DNA, 16 bp, Homo sapiens
ctgtagtgaactagaa

SEQ ID NO: 10605 - DNA, 20 bp, Homo sapiens
acaagaacctactgctaatg

SEQ ID NO: 10606 - DNA, 16 bp, Homo sapiens
cggcggcctctcattc

SEQ ID NO: 10607 - DNA, 20 bp, Homo sapiens
tgtcctcagtggagaaaaat

SEQ ID NO: 10608 - DNA, 16 bp, Homo sapiens
tcccagcggttgttac

SEQ ID NO: 10609 - DNA, 16 bp, Homo sapiens
gctcttccctattgct

SEQ ID NO: 10610 - DNA, 16 bp, Homo sapiens
atccgcagtgaattac

SEQ ID NO: 10611 - DNA, 16 bp, Homo sapiens
tgcacattattaaacc

SEQ ID NO: 10612 - DNA, 16 bp, Homo sapiens
aacgggaggggagaac

SEQ ID NO: 10613 - DNA, 14 bp, Homo sapiens
agtaaggaccagag

SEQ ID NO: 10614 - DNA, 20 bp, Homo sapiens
ccacttcgaagtagtgctga

SEQ ID NO: 10615 - DNA, 16 bp, Homo sapiens
cctttgtcccttgtgg

SEQ ID NO: 10616 - DNA, 16 bp, Homo sapiens
gggcagtgctatgttc

SEQ ID NO: 10617 - DNA, 16 bp, Homo sapiens
tgggccgtccttatac

SEQ ID NO: 10618 - DNA, 17 bp, Homo sapiens
ccaaactagaaatgcca

SEQ ID NO: 10619 - DNA, 25 bp, Homo sapiens
tgagaaatggcggcgttttcattat

SEQ ID NO: 10620 - DNA, 16 bp, Homo sapiens
gctagaacccatcatc

SEQ ID NO: 10621 - DNA, 14 bp, Homo sapiens
ccatacagtgagcc

SEQ ID NO: 10622 - DNA, 16 bp, Homo sapiens
tgtggtaagcctagag

SEQ ID NO: 10623 - DNA, 14 bp, Homo sapiens
accactgccaacat

SEQ ID NO: 10624 - DNA, 16 bp, Homo sapiens
tagtagctgcaaaaac

SEQ ID NO: 10625 - DNA, 15 bp, Homo sapiens
ggaagtctgtgccct

SEQ ID NO: 10626 - DNA, 16 bp, Homo sapiens
tcgtcaagctgaaaga

SEQ ID NO: 10627 - DNA, 16 bp, Homo sapiens
taataatcctcttgcc

SEQ ID NO: 10628 - DNA, 16 bp, Homo sapiens
cctcctaaaatccctg

SEQ ID NO: 10629 - DNA, 16 bp, Homo sapiens
cagtgcctctatgcgc

SEQ ID NO: 10630 - DNA, 16 bp, Homo sapiens
cagctgcatatggcaa

SEQ ID NO: 10631 - DNA, 16 bp, Homo sapiens
cgtgaggccgagccgg

SEQ ID NO: 10632 - DNA, 17 bp, Homo sapiens
atcccaaagtggtttgc

SEQ ID NO: 10633 - DNA, 16 bp, Homo sapiens
gcaaggctcggttagg

SEQ ID NO: 10634 - DNA, 16 bp, Homo sapiens
gatcctgtggctgttg

SEQ ID NO: 10635 - DNA, 18 bp, Homo sapiens
cctgggaacttcagccgg

SEQ ID NO: 10636 - DNA, 25 bp, Homo sapiens
aaagagcagcaactaaaagaaaagc

SEQ ID NO: 10637 - DNA, 16 bp, Homo sapiens
cccacatccaggtatc

SEQ ID NO: 10638 - DNA, 19 bp, Homo sapiens
ggggaagaaataattcagc

SEQ ID NO: 10639 - DNA, 16 bp, Homo sapiens
agccgatattaatcca

SEQ ID NO: 10640 - DNA, 20 bp, Homo sapiens
ttcctctccaggccttgccg

SEQ ID NO: 10641 - DNA, 16 bp, Homo sapiens
tgcctagaacctttca

SEQ ID NO: 10642 - DNA, 20 bp, Homo sapiens
atacaaggcagcagaaacct

SEQ ID NO: 10643 - DNA, 20 bp, Homo sapiens
aaggccgtgtgcgtgctgaa

SEQ ID NO: 10644 - DNA, 16 bp, Homo sapiens
tagcacttctttccct

SEQ ID NO: 10645 - DNA, 16 bp, Homo sapiens
gtgtgatttgcttgaa

SEQ ID NO: 10646 - DNA, 20 bp, Homo sapiens
tggcgacgaaggccgtgtgc

SEQ ID NO: 10647 - DNA, 16 bp, Homo sapiens
ctgcagttcatcagcc

SEQ ID NO: 10648 - DNA, 18 bp, Homo sapiens
tgatgaggaggagaaatg

SEQ ID NO: 10649 - DNA, 16 bp, Homo sapiens
gatgtctgagatagat

SEQ ID NO: 10650 - DNA, 16 bp, Homo sapiens
tggtgatgacaattta

SEQ ID NO: 10651 - DNA, 16 bp, Homo sapiens
tctggatggactgtcc

SEQ ID NO: 10652 - DNA, 16 bp, Homo sapiens
ggctgcctgccgttag

SEQ ID NO: 10653 - DNA, 12 bp, Homo sapiens
ctggtgtaatga

SEQ ID NO: 10654 - DNA, 16 bp, Homo sapiens
gatcaaggacatgatc

SEQ ID NO: 10655 - DNA, 18 bp, Homo sapiens
tgacaccgccaaatttaa

SEQ ID NO: 10656 - DNA, 16 bp, Homo sapiens
ggttcttgaagtggaa

SEQ ID NO: 10657 - DNA, 16 bp, Homo sapiens
ccaggagaacaccttc

SEQ ID NO: 10658 - DNA, 21 bp, Homo sapiens
aacgagatgatcatcaagcag

SEQ ID NO: 10659 - DNA, 16 bp, Homo sapiens
tgatggtgactctggc

SEQ ID NO: 10660 - DNA, 20 bp, Homo sapiens
gaccagatatgactgtgagg

SEQ ID NO: 10661 - DNA, 16 bp, Homo sapiens
ccgcaaaaccaaagcc

SEQ ID NO: 10662 - DNA, 16 bp, Homo sapiens
gagagtaaccattcca

SEQ ID NO: 10663 - DNA, 18 bp, Homo sapiens
aaaccgtttacttcaaga

SEQ ID NO: 10664 - DNA, 16 bp, Homo sapiens
gtgactttcagatacc

SEQ ID NO: 10665 - DNA, 25 bp, Homo sapiens
ttaggacaggccagagccaagcttg

SEQ ID NO: 10666 - DNA, 16 bp, Homo sapiens
gggaggctagattgct

SEQ ID NO: 10667 - DNA, 16 bp, Homo sapiens
gaggagcgcagggcgc

SEQ ID NO: 10668 - DNA, 18 bp, Homo sapiens
tggcacttgtgaagataa

SEQ ID NO: 10669 - DNA, 16 bp, Homo sapiens
gattcataatatgtca

SEQ ID NO: 10670 - DNA, 16 bp, Homo sapiens
aggcggggttttcccg

SEQ ID NO: 10671 - DNA, 16 bp, Homo sapiens
agtcaggactctggcc

SEQ ID NO: 10672 - DNA, 20 bp, Homo sapiens
ctgatgaattaaaaacagtg

SEQ ID NO: 10673 - DNA, 20 bp, Homo sapiens
caggccacctgagccaggcc

SEQ ID NO: 10674 - DNA, 16 bp, Homo sapiens
gaatagggattaagtg

SEQ ID NO: 10675 - DNA, 16 bp, Homo sapiens
acctttctagcttgat

SEQ ID NO: 10676 - DNA, 16 bp, Homo sapiens
gccttgtgaatatagc

SEQ ID NO: 10677 - DNA, 16 bp, Homo sapiens
tcgggggggcctcacg

SEQ ID NO: 10678 - DNA, 18 bp, Homo sapiens
aaagccctgttccggacc

SEQ ID NO: 10679 - DNA, 16 bp, Homo sapiens
cctaaaatccctgtcc

SEQ ID NO: 10680 - DNA, 18 bp, Homo sapiens
tggttccaagcagaagga

SEQ ID NO: 10681 - DNA, 16 bp, Homo sapiens
ttgaatagctattagc

SEQ ID NO: 10682 - DNA, 16 bp, Homo sapiens
cgagtttgaagtgtgt

SEQ ID NO: 10683 - DNA, 16 bp, Homo sapiens
gtgtgccaatagtgtt

SEQ ID NO: 10684 - DNA, 16 bp, Homo sapiens
tattaaccacacagcc

SEQ ID NO: 10685 - DNA, 12 bp, Homo sapiens
gggagatggtgt

SEQ ID NO: 10686 - DNA, 16 bp, Homo sapiens
gaaggacatccgtgca

SEQ ID NO: 10687 - DNA, 16 bp, Homo sapiens
gactggacattgcatc

SEQ ID NO: 10688 - DNA, 16 bp, Homo sapiens
ccagagcgtgtttgcc

SEQ ID NO: 10689 - DNA, 18 bp, Homo sapiens
ggcggcgttttcattatg

SEQ ID NO: 10690 - DNA, 18 bp, Homo sapiens
tggcaggcacacagcagc

SEQ ID NO: 10691 - DNA, 18 bp, Homo sapiens
tcgtgtttggcgctggcc

SEQ ID NO: 10692 - DNA, 16 bp, Homo sapiens
cgcaagagtaatttct

SEQ ID NO: 10693 - DNA, 20 bp, Homo sapiens
aaaggtggaaatgaagaaag

SEQ ID NO: 10694 - DNA, 16 bp, Homo sapiens
atagagcaggttgtgc

SEQ ID NO: 10695 - DNA, 14 bp, Homo sapiens
acctgcacaacctg

SEQ ID NO: 10696 - DNA, 16 bp, Homo sapiens
tgggcaatggatttgc

SEQ ID NO: 10697 - DNA, 16 bp, Homo sapiens
ctggcagggcctagtg

SEQ ID NO: 10698 - DNA, 16 bp, Homo sapiens
atcaacaacatcagcc

SEQ ID NO: 10699 - DNA, 16 bp, Homo sapiens
ggttgtaacaattctg

SEQ ID NO: 10700 - DNA, 16 bp, Homo sapiens
gcgcaggagcttcagt

SEQ ID NO: 10701 - DNA, 19 bp, Homo sapiens
ggaaagggtgaagctacag

SEQ ID NO: 10702 - DNA, 14 bp, Homo sapiens
tttgcagagcaata

SEQ ID NO: 10703 - DNA, 16 bp, Homo sapiens
gtgctgctactattac

SEQ ID NO: 10704 - DNA, 16 bp, Homo sapiens
tgccctacttctttgc

SEQ ID NO: 10705 - DNA, 16 bp, Homo sapiens
tgccgtaggtaataca

SEQ ID NO: 10706 - DNA, 16 bp, Homo sapiens
gttgcttcccgtgcca

SEQ ID NO: 10707 - DNA, 16 bp, Homo sapiens
cagccgagccatccct

SEQ ID NO: 10708 - DNA, 16 bp, Homo sapiens
gactaggcctcgaggg

SEQ ID NO: 10709 - DNA, 16 bp, Homo sapiens
tcagatccttctactg

SEQ ID NO: 10710 - DNA, 21 bp, Homo sapiens
cagatgttgataccacctatc

SEQ ID NO: 10711 - DNA, 16 bp, Homo sapiens
ttgctaccttgtctct

SEQ ID NO: 10712 - DNA, 16 bp, Homo sapiens
gacctggttatccagg

SEQ ID NO: 10713 - DNA, 20 bp, Homo sapiens
gacttcttcatgaggatgaa

SEQ ID NO: 10714 - DNA, 16 bp, Homo sapiens
ccagttgtgagtggca

SEQ ID NO: 10715 - DNA, 16 bp, Homo sapiens
gaaaaagcaggtcgtc

SEQ ID NO: 10716 - DNA, 20 bp, Homo sapiens
gtcctcggaaccaggacctc

SEQ ID NO: 10717 - DNA, 14 bp, Homo sapiens
actggacctgcacc

SEQ ID NO: 10718 - DNA, 16 bp, Homo sapiens
taaccttggtatacta

SEQ ID NO: 10719 - DNA, 16 bp, Homo sapiens
gataacccgattttgc

SEQ ID NO: 10720 - DNA, 14 bp, Homo sapiens
agtgttcaagaggt

SEQ ID NO: 10721 - DNA, 20 bp, Homo sapiens
tgaagaattactcagagctt

SEQ ID NO: 10722 - DNA, 12 bp, Homo sapiens
ggtcatgccagg

SEQ ID NO: 10723 - DNA, 16 bp, Homo sapiens
gacggggctcttcacc

SEQ ID NO: 10724 - DNA, 16 bp, Homo sapiens
gggcggcaccaatcct

SEQ ID NO: 10725 - DNA, 16 bp, Homo sapiens
agtatacatactgaga

SEQ ID NO: 10726 - DNA, 16 bp, Homo sapiens
tatagcagatgtggct

SEQ ID NO: 10727 - DNA, 16 bp, Homo sapiens
atcaacttcccattag

SEQ ID NO: 10728 - DNA, 16 bp, Homo sapiens
gcgggcgagctagctg

SEQ ID NO: 10729 - DNA, 16 bp, Homo sapiens
tgatggataagtaaca

SEQ ID NO: 10730 - DNA, 16 bp, Homo sapiens
tgacaccatcctgaat

SEQ ID NO: 10731 - DNA, 16 bp, Homo sapiens
tgggtctggggtagat

SEQ ID NO: 10732 - DNA, 16 bp, Homo sapiens
tcctgcgtccattgca

SEQ ID NO: 10733 - DNA, 14 bp, Homo sapiens
tccaggtgatgtac

SEQ ID NO: 10734 - DNA, 14 bp, Homo sapiens
acaccgccaaattt

SEQ ID NO: 10735 - DNA, 16 bp, Homo sapiens
ttcctccgagctggcg

SEQ ID NO: 10736 - DNA, 16 bp, Homo sapiens
tgtcattagtttagtg

SEQ ID NO: 10737 - DNA, 16 bp, Homo sapiens
ttaagcccttattgtg

SEQ ID NO: 10738 - DNA, 16 bp, Homo sapiens
taagctcagttcctac

SEQ ID NO: 10739 - DNA, 16 bp, Homo sapiens
aagtgtgccgagaagc

SEQ ID NO: 10740 - DNA, 16 bp, Homo sapiens
tgtctgaaatgtgtcg

SEQ ID NO: 10741 - DNA, 18 bp, Homo sapiens
gcacatccagggacccgg

SEQ ID NO: 10742 - DNA, 16 bp, Homo sapiens
attaaccttggtatac

SEQ ID NO: 10743 - DNA, 16 bp, Homo sapiens
aatgaacacattgcgg

SEQ ID NO: 10744 - DNA, 16 bp, Homo sapiens
catattaaccacacag

SEQ ID NO: 10745 - DNA, 16 bp, Homo sapiens
tcagatgggggtatgg

SEQ ID NO: 10746 - DNA, 16 bp, Homo sapiens
cgccactgttatctgt

SEQ ID NO: 10747 - DNA, 16 bp, Homo sapiens
aatatactcgtttgat

SEQ ID NO: 10748 - DNA, 16 bp, Homo sapiens
gcctggcagcattgca

SEQ ID NO: 10749 - DNA, 16 bp, Homo sapiens
atagtccttcccggcc

SEQ ID NO: 10750 - DNA, 16 bp, Homo sapiens
gctatgtcactttgtt

SEQ ID NO: 10751 - DNA, 16 bp, Homo sapiens
ctggtgtccactgtga

SEQ ID NO: 10752 - DNA, 20 bp, Homo sapiens
gccaacttctgctcaggccc

SEQ ID NO: 10753 - DNA, 16 bp, Homo sapiens
atcaatacagttaggc

SEQ ID NO: 10754 - DNA, 16 bp, Homo sapiens
ggacggggctcttcac

SEQ ID NO: 10755 - DNA, 16 bp, Homo sapiens
ctgaagagctacgggg

SEQ ID NO: 10756 - DNA, 16 bp, Homo sapiens
tgcctccacatatata

SEQ ID NO: 10757 - DNA, 16 bp, Homo sapiens
tcctaaaatccctgtc

SEQ ID NO: 10758 - DNA, 25 bp, Homo sapiens
aaagacacaaattcctgagaattgg

SEQ ID NO: 10759 - DNA, 16 bp, Homo sapiens
cttactctgtctcgcc

SEQ ID NO: 10760 - DNA, 16 bp, Homo sapiens
accaaaaaacttaagg

SEQ ID NO: 10761 - DNA, 16 bp, Homo sapiens
ggttcaggaatcgtca

SEQ ID NO: 10762 - DNA, 16 bp, Homo sapiens
cttaggactggacatt

SEQ ID NO: 10763 - DNA, 16 bp, Homo sapiens
tgtttcctcatatacc

SEQ ID NO: 10764 - DNA, 20 bp, Homo sapiens
cagtggctaacagaagctga

SEQ ID NO: 10765 - DNA, 22 bp, Homo sapiens
cttttattctagttgaaagaat

SEQ ID NO: 10766 - DNA, 16 bp, Homo sapiens
gggaagtgttgtgtgc

SEQ ID NO: 10767 - DNA, 14 bp, Homo sapiens
aaatcctcaggtag

SEQ ID NO: 10768 - DNA, 16 bp, Homo sapiens
ttgaccactgtaagtg

SEQ ID NO: 10769 - DNA, 16 bp, Homo sapiens
taagctgagggtggta

SEQ ID NO: 10770 - DNA, 14 bp, Homo sapiens
agacactgaagtta

SEQ ID NO: 10771 - DNA, 16 bp, Homo sapiens
gcacattttacccacc

SEQ ID NO: 10772 - DNA, 16 bp, Homo sapiens
actgtgcaccctagcc

SEQ ID NO: 10773 - DNA, 12 bp, Homo sapiens
agggttttgaca

SEQ ID NO: 10774 - DNA, 18 bp, Homo sapiens
tattcccagatctttaga

SEQ ID NO: 10775 - DNA, 16 bp, Homo sapiens
cgggtcgggtgtcgcc

SEQ ID NO: 10776 - DNA, 15 bp, Homo sapiens
ggtgatgacaattta

SEQ ID NO: 10777 - DNA, 16 bp, Homo sapiens
cccgcgtcaactgctg

SEQ ID NO: 10778 - DNA, 16 bp, Homo sapiens
aacttgactcttggct

SEQ ID NO: 10779 - DNA, 16 bp, Homo sapiens
cggccttgccctattc

SEQ ID NO: 10780 - DNA, 16 bp, Homo sapiens
cagatacatttacttg

SEQ ID NO: 10781 - DNA, 16 bp, Homo sapiens
gagccagctggcatgc

SEQ ID NO: 10782 - DNA, 16 bp, Homo sapiens
agcctgttgaatatag

SEQ ID NO: 10783 - DNA, 16 bp, Homo sapiens
gagtaccagatcaagg

SEQ ID NO: 10784 - DNA, 16 bp, Homo sapiens
ggctcacttcttctcc

SEQ ID NO: 10785 - DNA, 23 bp, Homo sapiens
gaaagacacaaattcctgagaat

SEQ ID NO: 10786 - DNA, 16 bp, Homo sapiens
tggcagcgcatactta

SEQ ID NO: 10787 - DNA, 16 bp, Homo sapiens
ctggacaccgcactgc

SEQ ID NO: 10788 - DNA, 20 bp, Homo sapiens
cagtgtcctgagactgtatg

SEQ ID NO: 10789 - DNA, 16 bp, Homo sapiens
agtcagatccttctac

SEQ ID NO: 10790 - DNA, 20 bp, Homo sapiens
atgtttactaaaggacaagt

SEQ ID NO: 10791 - DNA, 16 bp, Homo sapiens
gggttgatgtatctct

SEQ ID NO: 10792 - DNA, 16 bp, Homo sapiens
gccaggcaccctaggc

SEQ ID NO: 10793 - DNA, 14 bp, Homo sapiens
acaacctgctgggc

SEQ ID NO: 10794 - DNA, 16 bp, Homo sapiens
agcacttctttccctt

SEQ ID NO: 10795 - DNA, 16 bp, Homo sapiens
cgcccactcatttcta

SEQ ID NO: 10796 - DNA, 16 bp, Homo sapiens
gaccgggcttttcacc

SEQ ID NO: 10797 - DNA, 20 bp, Homo sapiens
gaggtgatggaaatcaaatt

SEQ ID NO: 10798 - DNA, 16 bp, Homo sapiens
gctgaccaccctgtaa

SEQ ID NO: 10799 - DNA, 16 bp, Homo sapiens
cgtcttcgccatcttc

SEQ ID NO: 10800 - DNA, 16 bp, Homo sapiens
ctgctcccgttttgtg

SEQ ID NO: 10801 - DNA, 14 bp, Homo sapiens
gttacattaagcta

SEQ ID NO: 10802 - DNA, 20 bp, Homo sapiens
tgagcttgctcatcagttgc

SEQ ID NO: 10803 - DNA, 19 bp, Homo sapiens
tgaaggcctgcatggattc

SEQ ID NO: 10804 - DNA, 16 bp, Homo sapiens
accgcaccagctgtag

SEQ ID NO: 10805 - DNA, 16 bp, Homo sapiens
gcccggccgtgatgcc

SEQ ID NO: 10806 - DNA, 16 bp, Homo sapiens
cccgcggttcaggaat

SEQ ID NO: 10807 - DNA, 18 bp, Homo sapiens
atgccactcaacgccact

SEQ ID NO: 10808 - DNA, 16 bp, Homo sapiens
tgactgcgggtctgcc

SEQ ID NO: 10809 - DNA, 16 bp, Homo sapiens
agggtgacctactcga

SEQ ID NO: 10810 - DNA, 16 bp, Homo sapiens
gcacattattaaaccc

SEQ ID NO: 10811 - DNA, 16 bp, Homo sapiens
tgtgagtccagctaac

SEQ ID NO: 10812 - DNA, 16 bp, Homo sapiens
aatggactctctctgc

SEQ ID NO: 10813 - DNA, 16 bp, Homo sapiens
cacacacggttagcac

SEQ ID NO: 10814 - DNA, 14 bp, Homo sapiens
gatttgaagtattc

SEQ ID NO: 10815 - DNA, 16 bp, Homo sapiens
gggccggccagtttct

SEQ ID NO: 10816 - DNA, 20 bp, Homo sapiens
ggaccagactgaatccctgt

SEQ ID NO: 10817 - DNA, 20 bp, Homo sapiens
gacaaagatggtgtggccga

SEQ ID NO: 10818 - DNA, 20 bp, Homo sapiens
cagaatgctcagagaaagcg

SEQ ID NO: 10819 - DNA, 16 bp, Homo sapiens
ccagagcttaattaag

SEQ ID NO: 10820 - DNA, 18 bp, Homo sapiens
aatgggcagaaaaggcag

SEQ ID NO: 10821 - DNA, 16 bp, Homo sapiens
aggctcacccttatga

SEQ ID NO: 10822 - DNA, 16 bp, Homo sapiens
gagggactcgttcact

SEQ ID NO: 10823 - DNA, 16 bp, Homo sapiens
gccctctaccattgct

SEQ ID NO: 10824 - DNA, 16 bp, Homo sapiens
ctactactcaaggaaa

SEQ ID NO: 10825 - DNA, 16 bp, Homo sapiens
ccacagcctcagtacc

SEQ ID NO: 10826 - DNA, 18 bp, Homo sapiens
acccagtgacaactcagg

SEQ ID NO: 10827 - DNA, 14 bp, Homo sapiens
agtatagagcgtgc

SEQ ID NO: 10828 - DNA, 16 bp, Homo sapiens
gaccttggttgccagc

SEQ ID NO: 10829 - DNA, 16 bp, Homo sapiens
gtttagtgctatgcct

SEQ ID NO: 10830 - DNA, 16 bp, Homo sapiens
aagaacatccatggag

SEQ ID NO: 10831 - DNA, 16 bp, Homo sapiens
aaagtctggcatgtga

SEQ ID NO: 10832 - DNA, 16 bp, Homo sapiens
ttttagccaccttgcc

SEQ ID NO: 10833 - DNA, 20 bp, Homo sapiens
tccaagaccctgtgttcatt

SEQ ID NO: 10834 - DNA, 16 bp, Homo sapiens
gcacagctgtacagta

SEQ ID NO: 10835 - DNA, 16 bp, Homo sapiens
gcctggcaggctaatc

SEQ ID NO: 10836 - DNA, 18 bp, Homo sapiens
gggtaaatacattcttca

SEQ ID NO: 10837 - DNA, 16 bp, Homo sapiens
tcgacattgagcagtc

SEQ ID NO: 10838 - DNA, 16 bp, Homo sapiens
ggaccagaacccttga

SEQ ID NO: 10839 - DNA, 16 bp, Homo sapiens
gcccgggccggccttg

SEQ ID NO: 10840 - DNA, 16 bp, Homo sapiens
gaccagaattcattct

SEQ ID NO: 10841 - DNA, 16 bp, Homo sapiens
agagagtagcttgccc

SEQ ID NO: 10842 - DNA, 16 bp, Homo sapiens
ctgattcctgttcccg

SEQ ID NO: 10843 - DNA, 16 bp, Homo sapiens
cagccctactctatgc

SEQ ID NO: 10844 - DNA, 16 bp, Homo sapiens
aagctctctatattag

SEQ ID NO: 10845 - DNA, 14 bp, Homo sapiens
tgaagttgccccat

SEQ ID NO: 10846 - DNA, 16 bp, Homo sapiens
aaaagtccagctggcc

SEQ ID NO: 10847 - DNA, 16 bp, Homo sapiens
catctagggtgtattt

SEQ ID NO: 10848 - DNA, 16 bp, Homo sapiens
ggagtgcctatcagtg

SEQ ID NO: 10849 - DNA, 16 bp, Homo sapiens
gccatctagatatcta

SEQ ID NO: 10850 - DNA, 20 bp, Homo sapiens
gaacgcagaagaaagggtgg

SEQ ID NO: 10851 - DNA, 16 bp, Homo sapiens
tttgcactgcaagtcc

SEQ ID NO: 10852 - DNA, 16 bp, Homo sapiens
gtgttgcactttgggg

SEQ ID NO: 10853 - DNA, 16 bp, Homo sapiens
gatgtcctctaaattt

SEQ ID NO: 10854 - DNA, 16 bp, Homo sapiens
taagtgcctgcactct

SEQ ID NO: 10855 - DNA, 16 bp, Homo sapiens
tactctgaaaattcga

SEQ ID NO: 10856 - DNA, 16 bp, Homo sapiens
tgggtaacacctcctt

SEQ ID NO: 10857 - DNA, 16 bp, Homo sapiens
ggtgcctttgctaggc

SEQ ID NO: 10858 - DNA, 20 bp, Homo sapiens
ggtgttcctggaagcaggtg

SEQ ID NO: 10859 - DNA, 16 bp, Homo sapiens
agtaagctcagttcct

SEQ ID NO: 10860 - DNA, 16 bp, Homo sapiens
gtgggtcggggtagtc

SEQ ID NO: 10861 - DNA, 20 bp, Homo sapiens
ccatgtgaccatgaggaaat

SEQ ID NO: 10862 - DNA, 16 bp, Homo sapiens
aagccgggccctggct

SEQ ID NO: 10863 - DNA, 16 bp, Homo sapiens
tcctccagataaattg

SEQ ID NO: 10864 - DNA, 16 bp, Homo sapiens
gaacatccatggagtc

SEQ ID NO: 10865 - DNA, 16 bp, Homo sapiens
aggagtaacctaagta

SEQ ID NO: 10866 - DNA, 16 bp, Homo sapiens
ggtgtcatggacatga

SEQ ID NO: 10867 - DNA, 20 bp, Homo sapiens
acgttgtgagtggtattatt

SEQ ID NO: 10868 - DNA, 16 bp, Homo sapiens
ttggatccacttagtc

SEQ ID NO: 10869 - DNA, 20 bp, Homo sapiens
gtgtgcgtgctgaagggcga

SEQ ID NO: 10870 - DNA, 16 bp, Homo sapiens
agctgggaataataca

SEQ ID NO: 10871 - DNA, 16 bp, Homo sapiens
tcggagacatatacgg

SEQ ID NO: 10872 - DNA, 16 bp, Homo sapiens
agaggtagtcctggaa

SEQ ID NO: 10873 - DNA, 16 bp, Homo sapiens
gactactttgaaatac

SEQ ID NO: 10874 - DNA, 16 bp, Homo sapiens
ccagcttcttttgccg

SEQ ID NO: 10875 - DNA, 16 bp, Homo sapiens
ggtggacactctggag

SEQ ID NO: 10876 - DNA, 14 bp, Homo sapiens
acagctagagggcc

SEQ ID NO: 10877 - DNA, 16 bp, Homo sapiens
catagctgctgtagct

SEQ ID NO: 10878 - DNA, 16 bp, Homo sapiens
acagtggcgggtgatc

SEQ ID NO: 10879 - DNA, 16 bp, Homo sapiens
cttgccctattcctct

SEQ ID NO: 10880 - DNA, 16 bp, Homo sapiens
aggcctcgttcctccg

SEQ ID NO: 10881 - DNA, 12 bp, Homo sapiens
agaccttctctg

SEQ ID NO: 10882 - DNA, 16 bp, Homo sapiens
ggctgccactctaata

SEQ ID NO: 10883 - DNA, 16 bp, Homo sapiens
aaaagtgtgccgagaa

SEQ ID NO: 10884 - DNA, 16 bp, Homo sapiens
tagaagcaaaatcgga

SEQ ID NO: 10885 - DNA, 12 bp, Homo sapiens
tatcaagaggat

SEQ ID NO: 10886 - DNA, 16 bp, Homo sapiens
tctggcaatgacttgt

SEQ ID NO: 10887 - DNA, 16 bp, Homo sapiens
ggcaggccttctataa

SEQ ID NO: 10888 - DNA, 16 bp, Homo sapiens
ccagtaagctcagttc

SEQ ID NO: 10889 - DNA, 20 bp, Homo sapiens
tccatgtcacacctttcagc

SEQ ID NO: 10890 - DNA, 16 bp, Homo sapiens
cagccggcccaccatt

SEQ ID NO: 10891 - DNA, 16 bp, Homo sapiens
ccacagaaacctgcgg

SEQ ID NO: 10892 - DNA, 16 bp, Homo sapiens
atgacggaggctggaa

SEQ ID NO: 10893 - DNA, 25 bp, Homo sapiens
accttcagaaccggaggcaacagtt

SEQ ID NO: 10894 - DNA, 20 bp, Homo sapiens
cgtgttatctgtcgctttga

SEQ ID NO: 10895 - DNA, 16 bp, Homo sapiens
gatgctgcctcttgtc

SEQ ID NO: 10896 - DNA, 16 bp, Homo sapiens
attgagcagtcctaca

SEQ ID NO: 10897 - DNA, 18 bp, Homo sapiens
tgtcaccaggggcttagg

SEQ ID NO: 10898 - DNA, 16 bp, Homo sapiens
gtggttgtgcctgagt

SEQ ID NO: 10899 - DNA, 16 bp, Homo sapiens
aaccgactatcaactc

SEQ ID NO: 10900 - DNA, 16 bp, Homo sapiens
gcagcctcattctggc

SEQ ID NO: 10901 - DNA, 18 bp, Homo sapiens
tgctgtcattatgaatgt

SEQ ID NO: 10902 - DNA, 20 bp, Homo sapiens
agaagagtaacttcctattc

SEQ ID NO: 10903 - DNA, 12 bp, Homo sapiens
actctcttcaca

SEQ ID NO: 10904 - DNA, 16 bp, Homo sapiens
ctcctaaaatccctgt

SEQ ID NO: 10905 - DNA, 16 bp, Homo sapiens
aacctgcggggtgccc

SEQ ID NO: 10906 - DNA, 16 bp, Homo sapiens
gcactctgtattctat

SEQ ID NO: 10907 - DNA, 16 bp, Homo sapiens
gacattgagcagtcct

SEQ ID NO: 10908 - DNA, 16 bp, Homo sapiens
taagcccttattgtgt

SEQ ID NO: 10909 - DNA, 18 bp, Homo sapiens
cagacccaggaagccctt

SEQ ID NO: 10910 - DNA, 20 bp, Homo sapiens
agtggattaccacagctgac

SEQ ID NO: 10911 - DNA, 16 bp, Homo sapiens
gggggagatcctggta

SEQ ID NO: 10912 - DNA, 16 bp, Homo sapiens
ggaagctttataaacc

SEQ ID NO: 10913 - DNA, 16 bp, Homo sapiens
tcagtctccgctgact

SEQ ID NO: 10914 - DNA, 16 bp, Homo sapiens
attgcggtccctggct

SEQ ID NO: 10915 - DNA, 20 bp, Homo sapiens
agaatttctttgtcattcaa

SEQ ID NO: 10916 - DNA, 16 bp, Homo sapiens
cgttggagactataaa

SEQ ID NO: 10917 - DNA, 20 bp, Homo sapiens
aaattcgacatgatccaggg

SEQ ID NO: 10918 - DNA, 16 bp, Homo sapiens
cacctcctaaaatccc

SEQ ID NO: 10919 - DNA, 20 bp, Homo sapiens
ttggacttcggccacatcaa

SEQ ID NO: 10920 - DNA, 16 bp, Homo sapiens
gcgctggggtgttgca

SEQ ID NO: 10921 - DNA, 16 bp, Homo sapiens
tatcagccctatagcc

SEQ ID NO: 10922 - DNA, 14 bp, Homo sapiens
aatccagaggctag

SEQ ID NO: 10923 - DNA, 12 bp, Homo sapiens
tgaagctcatgc

SEQ ID NO: 10924 - DNA, 16 bp, Homo sapiens
aggtggagtccttaaa

SEQ ID NO: 10925 - DNA, 16 bp, Homo sapiens
cgctcagtttgaccac

SEQ ID NO: 10926 - DNA, 16 bp, Homo sapiens
aaaatggtccctctcc

SEQ ID NO: 10927 - DNA, 16 bp, Homo sapiens
gggcgtatatcccagc

SEQ ID NO: 10928 - DNA, 20 bp, Homo sapiens
tcagctattcaccaaagttg

SEQ ID NO: 10929 - DNA, 16 bp, Homo sapiens
gcactggctccagcat

SEQ ID NO: 10930 - DNA, 16 bp, Homo sapiens
gttcctccgagctggc

SEQ ID NO: 10931 - DNA, 16 bp, Homo sapiens
aagtcaggtgatgcca

SEQ ID NO: 10932 - DNA, 16 bp, Homo sapiens
agccagccctacagct

SEQ ID NO: 10933 - DNA, 15 bp, Homo sapiens
atcaaaattgcttgg

SEQ ID NO: 10934 - DNA, 16 bp, Homo sapiens
tctataaatcctaggc

SEQ ID NO: 10935 - DNA, 16 bp, Homo sapiens
atatactcgtttgata

SEQ ID NO: 10936 - DNA, 16 bp, Homo sapiens
gcactgcgcaaagggg

SEQ ID NO: 10937 - DNA, 16 bp, Homo sapiens
gtgaaaattgatgcac

SEQ ID NO: 10938 - DNA, 16 bp, Homo sapiens
tctgtgccttggtagc

SEQ ID NO: 10939 - DNA, 16 bp, Homo sapiens
tgcactgcaagtccaa

SEQ ID NO: 10940 - DNA, 20 bp, Homo sapiens
ccactgagcgcaaatgtacc

SEQ ID NO: 10941 - DNA, 14 bp, Homo sapiens
tttatgcttcctat

SEQ ID NO: 10942 - DNA, 16 bp, Homo sapiens
tgatgggacggtgaaa

SEQ ID NO: 10943 - DNA, 16 bp, Homo sapiens
gcctcctagcttcgtg

SEQ ID NO: 10944 - DNA, 20 bp, Homo sapiens
gtttctcagaaagacacaaa

SEQ ID NO: 10945 - DNA, 16 bp, Homo sapiens
ctgaattaacttaggc

SEQ ID NO: 10946 - DNA, 16 bp, Homo sapiens
atgatttatttttgcg

SEQ ID NO: 10947 - DNA, 16 bp, Homo sapiens
actggctcagcttgac

SEQ ID NO: 10948 - DNA, 20 bp, Homo sapiens
atctaattttagaagcctgg

SEQ ID NO: 10949 - DNA, 20 bp, Homo sapiens
aaaggactgactgaaggcct

SEQ ID NO: 10950 - DNA, 20 bp, Homo sapiens
tatgcactttgtcgctatta

SEQ ID NO: 10951 - DNA, 16 bp, Homo sapiens
cgtgctgaagggcgac

SEQ ID NO: 10952 - DNA, 16 bp, Homo sapiens
tctgtcgaatagtaat

SEQ ID NO: 10953 - DNA, 16 bp, Homo sapiens
gaggtttcccaaagcc

SEQ ID NO: 10954 - DNA, 16 bp, Homo sapiens
ggcccaccattatccg

SEQ ID NO: 10955 - DNA, 16 bp, Homo sapiens
tatcggagcagcagtt

SEQ ID NO: 10956 - DNA, 14 bp, Homo sapiens
ggtgaagacacaca

SEQ ID NO: 10957 - DNA, 14 bp, Homo sapiens
gcctgtgcatgacc

SEQ ID NO: 10958 - DNA, 16 bp, Homo sapiens
gctggaaatgcttggg

SEQ ID NO: 10959 - DNA, 20 bp, Homo sapiens
ggagacccaggggacggtca

SEQ ID NO: 10960 - DNA, 16 bp, Homo sapiens
cctgagccgtgtgcct

SEQ ID NO: 10961 - DNA, 12 bp, Homo sapiens
gagcatattggt

SEQ ID NO: 10962 - DNA, 16 bp, Homo sapiens
tgctggtacctataga

SEQ ID NO: 10963 - DNA, 16 bp, Homo sapiens
cccgggccggccttgc

SEQ ID NO: 10964 - DNA, 16 bp, Homo sapiens
cctaggagacttctgg

SEQ ID NO: 10965 - DNA, 17 bp, Homo sapiens
ttctggtgatggcaatt

SEQ ID NO: 10966 - DNA, 16 bp, Homo sapiens
cttcagtaccttatta

SEQ ID NO: 10967 - DNA, 16 bp, Homo sapiens
cgcgcctgggctggtg

SEQ ID NO: 10968 - DNA, 16 bp, Homo sapiens
gccatattaaccacac

SEQ ID NO: 10969 - DNA, 16 bp, Homo sapiens
tataagtctagtaaca

SEQ ID NO: 10970 - DNA, 18 bp, Homo sapiens
cgggaggtggacgtggag

SEQ ID NO: 10971 - DNA, 16 bp, Homo sapiens
tggaaactacattgtc

SEQ ID NO: 10972 - DNA, 16 bp, Homo sapiens
agtcgctgccggccct

SEQ ID NO: 10973 - DNA, 16 bp, Homo sapiens
ggttttagtgacactt

SEQ ID NO: 10974 - DNA, 16 bp, Homo sapiens
agtcatggctctgtac

SEQ ID NO: 10975 - DNA, 16 bp, Homo sapiens
gtgtaccagtaagctc

SEQ ID NO: 10976 - DNA, 16 bp, Homo sapiens
ccctatcatgctgaca

SEQ ID NO: 10977 - DNA, 16 bp, Homo sapiens
ggaccagattcttctg

SEQ ID NO: 10978 - DNA, 15 bp, Homo sapiens
tacagcaggtgggtg

SEQ ID NO: 10979 - DNA, 16 bp, Homo sapiens
agctggtaattagatc

SEQ ID NO: 10980 - DNA, 16 bp, Homo sapiens
agaaacggttttctgg

SEQ ID NO: 10981 - DNA, 14 bp, Homo sapiens
catgagaactgatc

SEQ ID NO: 10982 - DNA, 16 bp, Homo sapiens
tagcaaactacagagc

SEQ ID NO: 10983 - DNA, 18 bp, Homo sapiens
gaaaaggccttgagctgc

SEQ ID NO: 10984 - DNA, 16 bp, Homo sapiens
ggctgacgggctagaa

SEQ ID NO: 10985 - DNA, 16 bp, Homo sapiens
gcactcaaccaatttt

SEQ ID NO: 10986 - DNA, 20 bp, Homo sapiens
gctcttccaggtaactcctc

SEQ ID NO: 10987 - DNA, 16 bp, Homo sapiens
gattcttctgctgatc

SEQ ID NO: 10988 - DNA, 12 bp, Homo sapiens
tgtcaccagctg

SEQ ID NO: 10989 - DNA, 18 bp, Homo sapiens
aagaaacacagcaacaat

SEQ ID NO: 10990 - DNA, 16 bp, Homo sapiens
tggacactgttaggcc

SEQ ID NO: 10991 - DNA, 16 bp, Homo sapiens
gaacagcccagttagt

SEQ ID NO: 10992 - DNA, 20 bp, Homo sapiens
cagggtgaagaattactcag

SEQ ID NO: 10993 - DNA, 16 bp, Homo sapiens
cgtgtgcctcctgtac

SEQ ID NO: 10994 - DNA, 16 bp, Homo sapiens
accatcttcattcgac

SEQ ID NO: 10995 - DNA, 16 bp, Homo sapiens
agagccgagtttgaag

SEQ ID NO: 10996 - DNA, 16 bp, Homo sapiens
gagtgcttttatgctc

SEQ ID NO: 10997 - DNA, 16 bp, Homo sapiens
tgatctcgtggtctca

SEQ ID NO: 10998 - DNA, 16 bp, Homo sapiens
cagttgtgttgtgcgt

SEQ ID NO: 10999 - DNA, 18 bp, Homo sapiens
ggtcttccgaggcgcccg

SEQ ID NO: 11000 - DNA, 14 bp, Homo sapiens
actgtccagcatgc

SEQ ID NO: 11001 - DNA, 16 bp, Homo sapiens
gccaggtccacttggc

SEQ ID NO: 11002 - DNA, 20 bp, Homo sapiens
caggacctcggcgtggccta

SEQ ID NO: 11003 - DNA, 16 bp, Homo sapiens
cagtttgaccactgta

SEQ ID NO: 11004 - DNA, 16 bp, Homo sapiens
acatagtccttcccgg

SEQ ID NO: 11005 - DNA, 20 bp, Homo sapiens
aaacctactgcagggtgaag

SEQ ID NO: 11006 - DNA, 16 bp, Homo sapiens
ctcatcgacctcccgg

SEQ ID NO: 11007 - DNA, 25 bp, Homo sapiens
aacaccttcagaaccggaggcaaca

SEQ ID NO: 11008 - DNA, 18 bp, Homo sapiens
ggacccgggcatccagga

SEQ ID NO: 11009 - DNA, 16 bp, Homo sapiens
gggagccctgatttca

SEQ ID NO: 11010 - DNA, 16 bp, Homo sapiens
gagatctgggattgtg

SEQ ID NO: 11011 - DNA, 16 bp, Homo sapiens
tcaccatgtagcctct

SEQ ID NO: 11012 - DNA, 27 bp, Homo sapiens
ttagaagatctgagctctgagtggaag

SEQ ID NO: 11013 - DNA, 16 bp, Homo sapiens
gtaacatgttatgaca

SEQ ID NO: 11014 - DNA, 16 bp, Homo sapiens
tgccgagaaggtaaca

SEQ ID NO: 11015 - DNA, 16 bp, Homo sapiens
cgcacaccacctagcc

SEQ ID NO: 11016 - DNA, 16 bp, Homo sapiens
ccaggagtggattgtg

SEQ ID NO: 11017 - DNA, 16 bp, Homo sapiens
caacaaccacatgcca

SEQ ID NO: 11018 - DNA, 16 bp, Homo sapiens
aaatgatgcaatagta

SEQ ID NO: 11019 - DNA, 16 bp, Homo sapiens
cagaccttggttgcca

SEQ ID NO: 11020 - DNA, 16 bp, Homo sapiens
cctctcctatgctctg

SEQ ID NO: 11021 - DNA, 16 bp, Homo sapiens
ccagtgtcctctaatt

SEQ ID NO: 11022 - DNA, 16 bp, Homo sapiens
acatggtgcataaaca

SEQ ID NO: 11023 - DNA, 18 bp, Homo sapiens
cgatgaggtgaaggagtc

SEQ ID NO: 11024 - DNA, 16 bp, Homo sapiens
tgcgcagctctgtgtg

SEQ ID NO: 11025 - DNA, 16 bp, Homo sapiens
tggcaaagtaaccctt

SEQ ID NO: 11026 - DNA, 20 bp, Homo sapiens
aaggacaagtcaccacagga

SEQ ID NO: 11027 - DNA, 16 bp, Homo sapiens
gtttgccaacagtgac

SEQ ID NO: 11028 - DNA, 16 bp, Homo sapiens
tgccactctaatagga

SEQ ID NO: 11029 - DNA, 14 bp, Homo sapiens
tacagcagcttcca

SEQ ID NO: 11030 - DNA, 16 bp, Homo sapiens
caggtgaagcattaac

SEQ ID NO: 11031 - DNA, 16 bp, Homo sapiens
tccgtcacctcctaaa

SEQ ID NO: 11032 - DNA, 16 bp, Homo sapiens
gctcttacacttggac

SEQ ID NO: 11033 - DNA, 16 bp, Homo sapiens
agtggactcataagcc

SEQ ID NO: 11034 - DNA, 16 bp, Homo sapiens
gccaggctttattctc

SEQ ID NO: 11035 - DNA, 16 bp, Homo sapiens
cgttggcccgggccgg

SEQ ID NO: 11036 - DNA, 16 bp, Homo sapiens
catggccaccgggccc

SEQ ID NO: 11037 - DNA, 16 bp, Homo sapiens
gcgattgctcctggct

SEQ ID NO: 11038 - DNA, 16 bp, Homo sapiens
caggtgtcatggacat

SEQ ID NO: 11039 - DNA, 16 bp, Homo sapiens
tccaggagctaatcaa

SEQ ID NO: 11040 - DNA, 18 bp, Homo sapiens
ggaggacaagcgcggctt

SEQ ID NO: 11041 - DNA, 16 bp, Homo sapiens
tcagtttgaccactgt

SEQ ID NO: 11042 - DNA, 16 bp, Homo sapiens
ttaagccagaccagaa

SEQ ID NO: 11043 - DNA, 18 bp, Homo sapiens
gacgtggagaaggtgacc

SEQ ID NO: 11044 - DNA, 16 bp, Homo sapiens
tcagccgatattaatc

SEQ ID NO: 11045 - DNA, 16 bp, Homo sapiens
caacctctcaaaaacc

SEQ ID NO: 11046 - DNA, 18 bp, Homo sapiens
tcctcaagaatgatggca

SEQ ID NO: 11047 - DNA, 21 bp, Homo sapiens
gaacaccttcagaaccggagg

SEQ ID NO: 11048 - DNA, 14 bp, Homo sapiens
aactggacctgcac

SEQ ID NO: 11049 - DNA, 16 bp, Homo sapiens
cgtcaagctgaaagag

SEQ ID NO: 11050 - DNA, 16 bp, Homo sapiens
gtgtcatgtcatgctt

SEQ ID NO: 11051 - DNA, 16 bp, Homo sapiens
tttgtagtcaacctct

SEQ ID NO: 11052 - DNA, 16 bp, Homo sapiens
cctactgggagtggac

SEQ ID NO: 11053 - DNA, 18 bp, Homo sapiens
caaactgttgtcagaaca

SEQ ID NO: 11054 - DNA, 20 bp, Homo sapiens
ggtgttctccatggaccaga

SEQ ID NO: 11055 - DNA, 16 bp, Homo sapiens
tgtggttcatgttgct

SEQ ID NO: 11056 - DNA, 16 bp, Homo sapiens
gcgaatcgtcaccact

SEQ ID NO: 11057 - DNA, 16 bp, Homo sapiens
gggcggcctctctctg

SEQ ID NO: 11058 - DNA, 16 bp, Homo sapiens
catgcatggactaatc

SEQ ID NO: 11059 - DNA, 16 bp, Homo sapiens
ctgctggtgattcagt

SEQ ID NO: 11060 - DNA, 16 bp, Homo sapiens
atgagccgaagtccct

SEQ ID NO: 11061 - DNA, 20 bp, Homo sapiens
accctgtatggcacttatta

SEQ ID NO: 11062 - DNA, 16 bp, Homo sapiens
tgggcttgggctatgt

SEQ ID NO: 11063 - DNA, 20 bp, Homo sapiens
ttatacaaggcaagcatttt

SEQ ID NO: 11064 - DNA, 16 bp, Homo sapiens
cttctgtgtgatagct

SEQ ID NO: 11065 - DNA, 16 bp, Homo sapiens
ctgccgagtcactgtc

SEQ ID NO: 11066 - DNA, 16 bp, Homo sapiens
ggccgggacttccttc

SEQ ID NO: 11067 - DNA, 16 bp, Homo sapiens
ggggagcaacggctac

SEQ ID NO: 11068 - DNA, 16 bp, Homo sapiens
atcaaggacatgatcc

SEQ ID NO: 11069 - DNA, 16 bp, Homo sapiens
ctgagtaacatgttat

SEQ ID NO: 11070 - DNA, 18 bp, Homo sapiens
ttgaaaaacaagaccagc

SEQ ID NO: 11071 - DNA, 18 bp, Homo sapiens
tgggtggaaacagggcga

SEQ ID NO: 11072 - DNA, 16 bp, Homo sapiens
acccatacatatgaag

SEQ ID NO: 11073 - DNA, 18 bp, Homo sapiens
taaaaccactggaatgct

SEQ ID NO: 11074 - DNA, 16 bp, Homo sapiens
tgatggcccagatacc

SEQ ID NO: 11075 - DNA, 16 bp, Homo sapiens
tcgctcgggtcgggtg

SEQ ID NO: 11076 - DNA, 12 bp, Homo sapiens
gaccataaccca

SEQ ID NO: 11077 - DNA, 16 bp, Homo sapiens
cacatcctattttgtc

SEQ ID NO: 11078 - DNA, 18 bp, Homo sapiens
tgggtcaagataattccc

SEQ ID NO: 11079 - DNA, 16 bp, Homo sapiens
actgcgcaaaggggcc

SEQ ID NO: 11080 - DNA, 12 bp, Homo sapiens
atcatgttgcag

SEQ ID NO: 11081 - DNA, 16 bp, Homo sapiens
agatgtcttctgcctg

SEQ ID NO: 11082 - DNA, 16 bp, Homo sapiens
agggactgtgatcacc

SEQ ID NO: 11083 - DNA, 16 bp, Homo sapiens
ccagaaggccctatgt

SEQ ID NO: 11084 - DNA, 16 bp, Homo sapiens
cccatatcgctttgtg

SEQ ID NO: 11085 - DNA, 14 bp, Homo sapiens
gtgctgaagggcga

SEQ ID NO: 11086 - DNA, 16 bp, Homo sapiens
agacacctagattcag

SEQ ID NO: 11087 - DNA, 16 bp, Homo sapiens
aaaacctaccttgtca

SEQ ID NO: 11088 - DNA, 25 bp, Homo sapiens
gtacaagaacaccttcagaaccgga

SEQ ID NO: 11089 - DNA, 12 bp, Homo sapiens
ggttgtgtagct

SEQ ID NO: 11090 - DNA, 16 bp, Homo sapiens
ggtccctgtgatgttt

SEQ ID NO: 11091 - DNA, 15 bp, Homo sapiens
ggaaaagagcagcaa

SEQ ID NO: 11092 - DNA, 16 bp, Homo sapiens
ctcctatgctctgctc

SEQ ID NO: 11093 - DNA, 16 bp, Homo sapiens
cttcggtggttattat

SEQ ID NO: 11094 - DNA, 16 bp, Homo sapiens
gactcatgtaataatc

SEQ ID NO: 11095 - DNA, 16 bp, Homo sapiens
aggacatccgtgcagc

SEQ ID NO: 11096 - DNA, 25 bp, Homo sapiens
atctttctgtcagaaaacatcagca

SEQ ID NO: 11097 - DNA, 16 bp, Homo sapiens
ccactgctgcaagttt

SEQ ID NO: 11098 - DNA, 16 bp, Homo sapiens
gctctgctccctccat

SEQ ID NO: 11099 - DNA, 16 bp, Homo sapiens
gggcagatcctttggg

SEQ ID NO: 11100 - DNA, 16 bp, Homo sapiens
gcaagcaggcctatct

SEQ ID NO: 11101 - DNA, 20 bp, Homo sapiens
gcgcaagtcctcaaagcaca

SEQ ID NO: 11102 - DNA, 20 bp, Homo sapiens
atttgtgaacccattcctca

SEQ ID NO: 11103 - DNA, 16 bp, Homo sapiens
ggcggcctctctctga

SEQ ID NO: 11104 - DNA, 16 bp, Homo sapiens
cccgtcttctttaaaa

SEQ ID NO: 11105 - DNA, 18 bp, Homo sapiens
ttcctttacaagtccagc

SEQ ID NO: 11106 - DNA, 16 bp, Homo sapiens
gaccggtgtccagcat

SEQ ID NO: 11107 - DNA, 20 bp, Homo sapiens
ccgttgcagtcctcggaacc

SEQ ID NO: 11108 - DNA, 16 bp, Homo sapiens
ggaggtgtctctattg

SEQ ID NO: 11109 - DNA, 16 bp, Homo sapiens
ggttcctcatgtgttc

SEQ ID NO: 11110 - DNA, 16 bp, Homo sapiens
ctggggccggctcgca

SEQ ID NO: 11111 - DNA, 18 bp, Homo sapiens
ggaggagagcaaagccct

SEQ ID NO: 11112 - DNA, 18 bp, Homo sapiens
gcaactttcatcatggct

SEQ ID NO: 11113 - DNA, 20 bp, Homo sapiens
ttacgaagacaaagtcccag

SEQ ID NO: 11114 - DNA, 16 bp, Homo sapiens
gtgaccctccatggcc

SEQ ID NO: 11115 - DNA, 16 bp, Homo sapiens
acatcactgggtgagt

SEQ ID NO: 11116 - DNA, 16 bp, Homo sapiens
ggaagtctgtgccctt

SEQ ID NO: 11117 - DNA, 18 bp, Homo sapiens
gtgcctgtgggaagacct

SEQ ID NO: 11118 - DNA, 16 bp, Homo sapiens
gccaatgaaattgctg

SEQ ID NO: 11119 - DNA, 16 bp, Homo sapiens
ggcagccgctgtgtcc

SEQ ID NO: 11120 - DNA, 16 bp, Homo sapiens
aggggaggatatcgca

SEQ ID NO: 11121 - DNA, 20 bp, Homo sapiens
agaattaccgaattgatggg

SEQ ID NO: 11122 - DNA, 18 bp, Homo sapiens
gtccgcgtgcccaccacc

SEQ ID NO: 11123 - DNA, 16 bp, Homo sapiens
cctctcttccgtgtga

SEQ ID NO: 11124 - DNA, 15 bp, Homo sapiens
tgagaagatagctgt

SEQ ID NO: 11125 - DNA, 16 bp, Homo sapiens
tcagggggagatcctg

SEQ ID NO: 11126 - DNA, 20 bp, Homo sapiens
agcctgtgaataaaaaccct

SEQ ID NO: 11127 - DNA, 16 bp, Homo sapiens
ccctgctcgactaggc

SEQ ID NO: 11128 - DNA, 31 bp, Homo sapiens
caccttcagaaccggaggcaacagttgaatg

SEQ ID NO: 11129 - DNA, 16 bp, Homo sapiens
gaaacctccgttttga

SEQ ID NO: 11130 - DNA, 25 bp, Homo sapiens
aagctaaggaagaagctgagcaggt

SEQ ID NO: 11131 - DNA, 18 bp, Homo sapiens
ctccaaactagaaatgcc

SEQ ID NO: 11132 - DNA, 16 bp, Homo sapiens
gctgcttcacatgtgg

SEQ ID NO: 11133 - DNA, 16 bp, Homo sapiens
gcataaatcttaaaca

SEQ ID NO: 11134 - DNA, 16 bp, Homo sapiens
caaaacacattcgggc

SEQ ID NO: 11135 - DNA, 16 bp, Homo sapiens
ccatctatataaagag

SEQ ID NO: 11136 - DNA, 20 bp, Homo sapiens
agatggtgtggccgatgtgt

SEQ ID NO: 11137 - DNA, 12 bp, Homo sapiens
ccagcaacatcg

SEQ ID NO: 11138 - DNA, 16 bp, Homo sapiens
agtgtgttgatctcgt

SEQ ID NO: 11139 - DNA, 14 bp, Homo sapiens
actctgatccagag

SEQ ID NO: 11140 - DNA, 16 bp, Homo sapiens
ccattatccgcccagc

SEQ ID NO: 11141 - DNA, 18 bp, Homo sapiens
atttcatcctactactgt

SEQ ID NO: 11142 - DNA, 19 bp, Homo sapiens
ggtggaaatgaagaaagta

SEQ ID NO: 11143 - DNA, 16 bp, Homo sapiens
ggcagcctgggtgcac

SEQ ID NO: 11144 - DNA, 16 bp, Homo sapiens
cctttgctaggcccgg

SEQ ID NO: 11145 - DNA, 14 bp, Homo sapiens
caaatccagaggct

SEQ ID NO: 11146 - DNA, 16 bp, Homo sapiens
acgggaggggagaacg

SEQ ID NO: 11147 - DNA, 16 bp, Homo sapiens
atggtgacacctgtag

SEQ ID NO: 11148 - DNA, 16 bp, Homo sapiens
agaaattaacctagct

SEQ ID NO: 11149 - DNA, 16 bp, Homo sapiens
acattaggtgttgttc

SEQ ID NO: 11150 - DNA, 14 bp, Homo sapiens
ccatccagctggtg

SEQ ID NO: 11151 - DNA, 20 bp, Homo sapiens
agtaacctttcatcatgatc

SEQ ID NO: 11152 - DNA, 16 bp, Homo sapiens
acaatctgaataaagg

SEQ ID NO: 11153 - DNA, 16 bp, Homo sapiens
aacagaaactagtagt

SEQ ID NO: 11154 - DNA, 18 bp, Homo sapiens
cagcagtaaagcgattgt

SEQ ID NO: 11155 - DNA, 16 bp, Homo sapiens
ccacaaggacttgggc

SEQ ID NO: 11156 - DNA, 16 bp, Homo sapiens
ctgggctgtcattgga

SEQ ID NO: 11157 - DNA, 16 bp, Homo sapiens
cgcctcctagcttcgt

SEQ ID NO: 11158 - DNA, 12 bp, Homo sapiens
atgaaagtgaat

SEQ ID NO: 11159 - DNA, 16 bp, Homo sapiens
cgggagctggatgact

SEQ ID NO: 11160 - DNA, 16 bp, Homo sapiens
ccagaaaacccttagg

SEQ ID NO: 11161 - DNA, 16 bp, Homo sapiens
gaggatcgcctaggca

SEQ ID NO: 11162 - DNA, 16 bp, Homo sapiens
caggagtggattgtgg

SEQ ID NO: 11163 - DNA, 12 bp, Homo sapiens
gattgcatagga

SEQ ID NO: 11164 - DNA, 16 bp, Homo sapiens
ttgccaacagtgacct

SEQ ID NO: 11165 - DNA, 16 bp, Homo sapiens
gctgggattatcatgc

SEQ ID NO: 11166 - DNA, 16 bp, Homo sapiens
actgatagtatctcca

SEQ ID NO: 11167 - DNA, 19 bp, Homo sapiens
tgtaatcttaaaagtgtaa

SEQ ID NO: 11168 - DNA, 16 bp, Homo sapiens
catacttacagtccca

SEQ ID NO: 11169 - DNA, 20 bp, Homo sapiens
gatggaagcactagacaaag

SEQ ID NO: 11170 - DNA, 14 bp, Homo sapiens
gaactatatctttg

SEQ ID NO: 11171 - DNA, 25 bp, Homo sapiens
aggtcttaggacaggccagagccaa

SEQ ID NO: 11172 - DNA, 16 bp, Homo sapiens
ggactcgcggctggac

SEQ ID NO: 11173 - DNA, 16 bp, Homo sapiens
aggaaatgtcattcga

SEQ ID NO: 11174 - DNA, 16 bp, Homo sapiens
tcctgatgggatttga

SEQ ID NO: 11175 - DNA, 20 bp, Homo sapiens
tctctgtccacttgcaccac

SEQ ID NO: 11176 - DNA, 16 bp, Homo sapiens
cctcaagatccgtgat

SEQ ID NO: 11177 - DNA, 16 bp, Homo sapiens
tgtcgccagttgtccc

SEQ ID NO: 11178 - DNA, 16 bp, Homo sapiens
gagctgccacctggac

SEQ ID NO: 11179 - DNA, 16 bp, Homo sapiens
cgtcacctcctaaaat

SEQ ID NO: 11180 - DNA, 16 bp, Homo sapiens
gtttagcacagtgggg

SEQ ID NO: 11181 - DNA, 16 bp, Homo sapiens
gggaaagcccatgtag

SEQ ID NO: 11182 - DNA, 18 bp, Homo sapiens
cacgttcatcaagcagat

SEQ ID NO: 11183 - DNA, 16 bp, Homo sapiens
ctcggcagaccagagc

SEQ ID NO: 11184 - DNA, 16 bp, Homo sapiens
ttcttctgctgatcga

SEQ ID NO: 11185 - DNA, 16 bp, Homo sapiens
caaagtaacccttacc

SEQ ID NO: 11186 - DNA, 16 bp, Homo sapiens
atggcagcgcatactt

SEQ ID NO: 11187 - DNA, 16 bp, Homo sapiens
atagtggattttagct

SEQ ID NO: 11188 - DNA, 16 bp, Homo sapiens
tttgtaaccagttgcc

SEQ ID NO: 11189 - DNA, 23 bp, Homo sapiens
gggaacatgctaaatacaaatgg

SEQ ID NO: 11190 - DNA, 16 bp, Homo sapiens
acttcccattagcagg

SEQ ID NO: 11191 - DNA, 16 bp, Homo sapiens
tagtgcccagctggca

SEQ ID NO: 11192 - DNA, 16 bp, Homo sapiens
gagcgtgtttgccaac

SEQ ID NO: 11193 - DNA, 16 bp, Homo sapiens
acccaatgatcttgct

SEQ ID NO: 11194 - DNA, 20 bp, Homo sapiens
ctcagagctttggatcaagt

SEQ ID NO: 11195 - DNA, 16 bp, Homo sapiens
atgctgctcctgtgtt

SEQ ID NO: 11196 - DNA, 16 bp, Homo sapiens
ggcctaccagctggcc

SEQ ID NO: 11197 - DNA, 16 bp, Homo sapiens
tcaacatgcccgtata

SEQ ID NO: 11198 - DNA, 16 bp, Homo sapiens
tgcttctcccttgtac

SEQ ID NO: 11199 - DNA, 16 bp, Homo sapiens
ataaaaaagtgtgccg

SEQ ID NO: 11200 - DNA, 12 bp, Homo sapiens
ccagttttataa

SEQ ID NO: 11201 - DNA, 16 bp, Homo sapiens
ctttgatacataggtt

SEQ ID NO: 11202 - DNA, 16 bp, Homo sapiens
agcgtgttgtttgttg

SEQ ID NO: 11203 - DNA, 16 bp, Homo sapiens
tagtgtgttaaatgtc

SEQ ID NO: 11204 - DNA, 16 bp, Homo sapiens
cgagaggagacagagc

SEQ ID NO: 11205 - DNA, 15 bp, Homo sapiens
tcctcagtgaggaag

SEQ ID NO: 11206 - DNA, 20 bp, Homo sapiens
gatgacttgggcaaaggtgg

SEQ ID NO: 11207 - DNA, 16 bp, Homo sapiens
caacagtgacctcttc

SEQ ID NO: 11208 - DNA, 16 bp, Homo sapiens
aggcagcatatcacta

SEQ ID NO: 11209 - DNA, 20 bp, Homo sapiens
ctcatccatgtgaccatgag

SEQ ID NO: 11210 - DNA, 16 bp, Homo sapiens
acttgttaaagtgact

SEQ ID NO: 11211 - DNA, 16 bp, Homo sapiens
cagaccagaattcatt

SEQ ID NO: 11212 - DNA, 16 bp, Homo sapiens
ggcagcccatttttgg

SEQ ID NO: 11213 - DNA, 16 bp, Homo sapiens
aaacggtaaataaaca

SEQ ID NO: 11214 - DNA, 16 bp, Homo sapiens
caaggtgttgatattc

SEQ ID NO: 11215 - DNA, 16 bp, Homo sapiens
acattgagcagtccta

SEQ ID NO: 11216 - DNA, 20 bp, Homo sapiens
gttaaaatgtctgtttcaat

SEQ ID NO: 11217 - DNA, 16 bp, Homo sapiens
gattgactgtttagca

SEQ ID NO: 11218 - DNA, 16 bp, Homo sapiens
caatctcgcctcctga

SEQ ID NO: 11219 - DNA, 16 bp, Homo sapiens
ctgtcatggttaaatg

SEQ ID NO: 11220 - DNA, 16 bp, Homo sapiens
taccaggccatctgct

SEQ ID NO: 11221 - DNA, 16 bp, Homo sapiens
agaaggacatccgtgc

SEQ ID NO: 11222 - DNA, 25 bp, Homo sapiens
tgaacagtttctcagaaagacacaa

SEQ ID NO: 11223 - DNA, 16 bp, Homo sapiens
gcactgctgagatatt

SEQ ID NO: 11224 - DNA, 16 bp, Homo sapiens
ctaagggcctttgggg

SEQ ID NO: 11225 - DNA, 16 bp, Homo sapiens
cagggccagcctcgtc

SEQ ID NO: 11226 - DNA, 16 bp, Homo sapiens
ctttgatgaagtccgg

SEQ ID NO: 11227 - DNA, 16 bp, Homo sapiens
cactcctgttctatag

SEQ ID NO: 11228 - DNA, 16 bp, Homo sapiens
gtaccagatcaaggac

SEQ ID NO: 11229 - DNA, 16 bp, Homo sapiens
ggcctcttccttaacg

SEQ ID NO: 11230 - DNA, 16 bp, Homo sapiens
gcctgaaaccctgatg

SEQ ID NO: 11231 - DNA, 16 bp, Homo sapiens
gaaatgtgtcgacctg

SEQ ID NO: 11232 - DNA, 18 bp, Homo sapiens
acaacgagaaccggatgg

SEQ ID NO: 11233 - DNA, 21 bp, Homo sapiens
tacctatactcctcggcagac

SEQ ID NO: 11234 - DNA, 14 bp, Homo sapiens
agcatattggtgct

SEQ ID NO: 11235 - DNA, 25 bp, Homo sapiens
actgaccactattggagcctgtaag

SEQ ID NO: 11236 - DNA, 12 bp, Homo sapiens
agagggaacaac

SEQ ID NO: 11237 - DNA, 16 bp, Homo sapiens
aagtggcagccttcat

SEQ ID NO: 11238 - DNA, 16 bp, Homo sapiens
aagctgtaattaagcc

SEQ ID NO: 11239 - DNA, 20 bp, Homo sapiens
gtggtagccacaattgcaca

SEQ ID NO: 11240 - DNA, 14 bp, Homo sapiens
gccagacattgcaa

SEQ ID NO: 11241 - DNA, 19 bp, Homo sapiens
gagaccattgcatcattgg

SEQ ID NO: 11242 - DNA, 20 bp, Homo sapiens
tttgccagcagtacgtggta

SEQ ID NO: 11243 - DNA, 12 bp, Homo sapiens
gccacccaaacg

SEQ ID NO: 11244 - DNA, 16 bp, Homo sapiens
gtttgaagtgtgttga

SEQ ID NO: 11245 - DNA, 16 bp, Homo sapiens
cataaaaaagtgtgcc

SEQ ID NO: 11246 - DNA, 20 bp, Homo sapiens
catccctgcgaccatgagga

SEQ ID NO: 11247 - DNA, 16 bp, Homo sapiens
acctttgaccctagcc

SEQ ID NO: 11248 - DNA, 16 bp, Homo sapiens
cactctgtattctatt

SEQ ID NO: 11249 - DNA, 16 bp, Homo sapiens
catctcggccagttcg

SEQ ID NO: 11250 - DNA, 20 bp, Homo sapiens
actcatccatgtgaccatga

SEQ ID NO: 11251 - DNA, 16 bp, Homo sapiens
ggagctaatcaataca

SEQ ID NO: 11252 - DNA, 18 bp, Homo sapiens
tgttgcctgagcgatgag

SEQ ID NO: 11253 - DNA, 20 bp, Homo sapiens
cgagcagaaggcaagggctg

SEQ ID NO: 11254 - DNA, 16 bp, Homo sapiens
ggaccaggctcccagt

SEQ ID NO: 11255 - DNA, 16 bp, Homo sapiens
ctgagctgatatatac

SEQ ID NO: 11256 - DNA, 16 bp, Homo sapiens
aggccgccctgtgcgt

SEQ ID NO: 11257 - DNA, 16 bp, Homo sapiens
gcccttcgtgtttttc

SEQ ID NO: 11258 - DNA, 16 bp, Homo sapiens
aatgtcaactccagga

SEQ ID NO: 11259 - DNA, 16 bp, Homo sapiens
ccagtccacctatgcc

SEQ ID NO: 11260 - DNA, 18 bp, Homo sapiens
aagaatgggcttgaaaca

SEQ ID NO: 11261 - DNA, 16 bp, Homo sapiens
aatgtccaccctgtac

SEQ ID NO: 11262 - DNA, 30 bp, Homo sapiens
acaagaacaccttcagaaccggaggcaaca

SEQ ID NO: 11263 - DNA, 16 bp, Homo sapiens
tgggctggtgatgctc

SEQ ID NO: 11264 - DNA, 17 bp, Homo sapiens
ccaggatggcattgggc

SEQ ID NO: 11265 - DNA, 20 bp, Homo sapiens
gtatagttttataaaactca

SEQ ID NO: 11266 - DNA, 16 bp, Homo sapiens
aaaaccctgtttagct

SEQ ID NO: 11267 - DNA, 16 bp, Homo sapiens
agccagcaccaaaaca

SEQ ID NO: 11268 - DNA, 16 bp, Homo sapiens
cgtcatgagcgtggcc

SEQ ID NO: 11269 - DNA, 16 bp, Homo sapiens
cgggtcctgttttgtt

SEQ ID NO: 11270 - DNA, 14 bp, Homo sapiens
acatcaattactgt

SEQ ID NO: 11271 - DNA, 16 bp, Homo sapiens
ggggtgcaggggtata

SEQ ID NO: 11272 - DNA, 16 bp, Homo sapiens
tgagatcagtatcaaa

SEQ ID NO: 11273 - DNA, 20 bp, Homo sapiens
tcctggaagcaggtgctaca

SEQ ID NO: 11274 - DNA, 20 bp, Homo sapiens
agaaggcagtaacctttcat

SEQ ID NO: 11275 - DNA, 15 bp, Homo sapiens
accattaatttgcct

SEQ ID NO: 11276 - DNA, 16 bp, Homo sapiens
agggtcaagcttgtgc

SEQ ID NO: 11277 - DNA, 19 bp, Homo sapiens
tagaaatgtatcctgataa

SEQ ID NO: 11278 - DNA, 18 bp, Homo sapiens
agcagcagcagcacctac

SEQ ID NO: 11279 - DNA, 16 bp, Homo sapiens
ccagtgtgacttatta

SEQ ID NO: 11280 - DNA, 18 bp, Homo sapiens
caccttcagaaccggagg

SEQ ID NO: 11281 - DNA, 16 bp, Homo sapiens
ccggccatattaacca

SEQ ID NO: 11282 - DNA, 14 bp, Homo sapiens
gattcgacttagac

SEQ ID NO: 11283 - DNA, 16 bp, Homo sapiens
agatcccatctcggcc

SEQ ID NO: 11284 - DNA, 14 bp, Homo sapiens
gctaagggactttg

SEQ ID NO: 11285 - DNA, 16 bp, Homo sapiens
cgaacagactgtagtc

SEQ ID NO: 11286 - DNA, 16 bp, Homo sapiens
gttgctcccattctca

SEQ ID NO: 11287 - DNA, 16 bp, Homo sapiens
tacaacatccttatgt

SEQ ID NO: 11288 - DNA, 16 bp, Homo sapiens
cctccacatatatatt

SEQ ID NO: 11289 - DNA, 16 bp, Homo sapiens
atacagagcggttccg

SEQ ID NO: 11290 - DNA, 16 bp, Homo sapiens
tatcttaagtaaaggc

SEQ ID NO: 11291 - DNA, 16 bp, Homo sapiens
ggcatctaacaaagcc

SEQ ID NO: 11292 - DNA, 16 bp, Homo sapiens
aagaaggacatccgtg

SEQ ID NO: 11293 - DNA, 20 bp, Homo sapiens
ttactctggtgacacaacct

SEQ ID NO: 11294 - DNA, 16 bp, Homo sapiens
cttgggctatgtgggt

SEQ ID NO: 11295 - DNA, 12 bp, Homo sapiens
caatgaacctga

SEQ ID NO: 11296 - DNA, 16 bp, Homo sapiens
agagcggttccgtcac

SEQ ID NO: 11297 - DNA, 18 bp, Homo sapiens
ctactcacacttcacgtg

SEQ ID NO: 11298 - DNA, 15 bp, Homo sapiens
aaaaggtggtcaaga

SEQ ID NO: 11299 - DNA, 16 bp, Homo sapiens
cttcccggccatatta

SEQ ID NO: 11300 - DNA, 16 bp, Homo sapiens
gtaatttacattccgc

SEQ ID NO: 11301 - DNA, 16 bp, Homo sapiens
tcgtccagccatcttc

SEQ ID NO: 11302 - DNA, 16 bp, Homo sapiens
gcaccactgctctttc

SEQ ID NO: 11303 - DNA, 16 bp, Homo sapiens
tctgtacttaggtaca

SEQ ID NO: 11304 - DNA, 16 bp, Homo sapiens
ttgtcctcaatctgtg

SEQ ID NO: 11305 - DNA, 12 bp, Homo sapiens
actggaagccct

SEQ ID NO: 11306 - DNA, 14 bp, Homo sapiens
cctggttccctgag

SEQ ID NO: 11307 - DNA, 20 bp, Homo sapiens
acctttcagcccaatggaga

SEQ ID NO: 11308 - DNA, 16 bp, Homo sapiens
taggcagcatatcact

SEQ ID NO: 11309 - DNA, 16 bp, Homo sapiens
ggacatccgtgcagca

SEQ ID NO: 11310 - DNA, 16 bp, Homo sapiens
aaagagccgagtttga

SEQ ID NO: 11311 - DNA, 16 bp, Homo sapiens
aggcctacggaccatc

SEQ ID NO: 11312 - DNA, 16 bp, Homo sapiens
agcggcaagcctggcc

SEQ ID NO: 11313 - DNA, 16 bp, Homo sapiens
aggcggagccctggtg

SEQ ID NO: 11314 - DNA, 16 bp, Homo sapiens
ggtccttatcattact

SEQ ID NO: 11315 - DNA, 14 bp, Homo sapiens
tggaaggagctttc

SEQ ID NO: 11316 - DNA, 20 bp, Homo sapiens
gcctagcgagttatggcgac

SEQ ID NO: 11317 - DNA, 16 bp, Homo sapiens
attagctactctaatg

SEQ ID NO: 11318 - DNA, 14 bp, Homo sapiens
ccggctgcggtcca

SEQ ID NO: 11319 - DNA, 16 bp, Homo sapiens
tccgtgtgtgatggtg

SEQ ID NO: 11320 - DNA, 18 bp, Homo sapiens
atcaacgccgagatcgag

SEQ ID NO: 11321 - DNA, 16 bp, Homo sapiens
ctcagatcccatctcg

SEQ ID NO: 11322 - DNA, 16 bp, Homo sapiens
gcgtcttgccgaggcc

SEQ ID NO: 11323 - DNA, 16 bp, Homo sapiens
taggagtaacctaagt

SEQ ID NO: 11324 - DNA, 16 bp, Homo sapiens
gcagggcctcaggccg

SEQ ID NO: 11325 - DNA, 16 bp, Homo sapiens
actcctcgctcagttt

SEQ ID NO: 11326 - DNA, 16 bp, Homo sapiens
aggcaaggcattaagc

SEQ ID NO: 11327 - DNA, 14 bp, Homo sapiens
tcctgaccaatctt

SEQ ID NO: 11328 - DNA, 16 bp, Homo sapiens
atgtgtcgacctggtt

SEQ ID NO: 11329 - DNA, 16 bp, Homo sapiens
gggagggcctctagag

SEQ ID NO: 11330 - DNA, 16 bp, Homo sapiens
atacgggaccctgcgc

SEQ ID NO: 11331 - DNA, 20 bp, Homo sapiens
attcctttagatagcaagac

SEQ ID NO: 11332 - DNA, 16 bp, Homo sapiens
ggtgtcgcctgagaac

SEQ ID NO: 11333 - DNA, 16 bp, Homo sapiens
gggcggcactgaatca

SEQ ID NO: 11334 - DNA, 16 bp, Homo sapiens
ctggcatgcgataggt

SEQ ID NO: 11335 - DNA, 16 bp, Homo sapiens
aaggcaccaattgtga

SEQ ID NO: 11336 - DNA, 16 bp, Homo sapiens
agtaaggaccagagac

SEQ ID NO: 11337 - DNA, 16 bp, Homo sapiens
atccgtgatgtggaga

SEQ ID NO: 11338 - DNA, 16 bp, Homo sapiens
aagtgcacaattaaca

SEQ ID NO: 11339 - DNA, 16 bp, Homo sapiens
tgcgtttggtttcttg

SEQ ID NO: 11340 - DNA, 16 bp, Homo sapiens
gacaaccgactatcaa

SEQ ID NO: 11341 - DNA, 16 bp, Homo sapiens
cactgcaagtccaaaa

SEQ ID NO: 11342 - DNA, 16 bp, Homo sapiens
gcagcgtgggttgggc

SEQ ID NO: 11343 - DNA, 20 bp, Homo sapiens
gagacggaggtgttctatga

SEQ ID NO: 11344 - DNA, 19 bp, Homo sapiens
atccagaaaacacggtggg

SEQ ID NO: 11345 - DNA, 16 bp, Homo sapiens
ccttgccctattcctc

SEQ ID NO: 11346 - DNA, 20 bp, Homo sapiens
ttctccatggaccagactga

SEQ ID NO: 11347 - DNA, 16 bp, Homo sapiens
tggcattcgaggccat

SEQ ID NO: 11348 - DNA, 16 bp, Homo sapiens
agctccgggaatggcc

SEQ ID NO: 11349 - DNA, 16 bp, Homo sapiens
cggtgtgcccatctgt

SEQ ID NO: 11350 - DNA, 16 bp, Homo sapiens
gtaacccttacctcaa

SEQ ID NO: 11351 - DNA, 16 bp, Homo sapiens
tgggatttgtctatgc

SEQ ID NO: 11352 - DNA, 16 bp, Homo sapiens
gctcagtggcttgttg

SEQ ID NO: 11353 - DNA, 12 bp, Homo sapiens
aatgagttttgc

SEQ ID NO: 11354 - DNA, 20 bp, Homo sapiens
tcagaacattgaatgcaact

SEQ ID NO: 11355 - DNA, 16 bp, Homo sapiens
gttgatctcgtggtct

SEQ ID NO: 11356 - DNA, 16 bp, Homo sapiens
gagccttcttgttctc

SEQ ID NO: 11357 - DNA, 16 bp, Homo sapiens
aagtccatccgcgacc

SEQ ID NO: 11358 - DNA, 16 bp, Homo sapiens
ccataatacctaatcc

SEQ ID NO: 11359 - DNA, 16 bp, Homo sapiens
ggtttgggtccagagt

SEQ ID NO: 11360 - DNA, 16 bp, Homo sapiens
ggccaggtcgttgagg

SEQ ID NO: 11361 - DNA, 16 bp, Homo sapiens
acaagaaacttaaggt

SEQ ID NO: 11362 - DNA, 16 bp, Homo sapiens
ctcagaatcaaatcga

SEQ ID NO: 11363 - DNA, 16 bp, Homo sapiens
gtgtacatagtccttc

SEQ ID NO: 11364 - DNA, 16 bp, Homo sapiens
aatgtgtcgacctggt

SEQ ID NO: 11365 - DNA, 16 bp, Homo sapiens
ccggagctgggtgtcg

SEQ ID NO: 11366 - DNA, 16 bp, Homo sapiens
ccgtaactccttcttt

SEQ ID NO: 11367 - DNA, 16 bp, Homo sapiens
caggaaacacatcatc

SEQ ID NO: 11368 - DNA, 16 bp, Homo sapiens
aagcaggtcgtcaagc

SEQ ID NO: 11369 - DNA, 16 bp, Homo sapiens
tgacactcagctttga

SEQ ID NO: 11370 - DNA, 16 bp, Homo sapiens
aagaatctcataacca

SEQ ID NO: 11371 - DNA, 19 bp, Homo sapiens
tggtccatgaaaaagcaga

SEQ ID NO: 11372 - DNA, 16 bp, Homo sapiens
agaggggtgcttgtcc

SEQ ID NO: 11373 - DNA, 16 bp, Homo sapiens
ggttccgtcacctcct

SEQ ID NO: 11374 - DNA, 16 bp, Homo sapiens
gttccatccattatta

SEQ ID NO: 11375 - DNA, 20 bp, Homo sapiens
gttttggggctcgaggccca

SEQ ID NO: 11376 - DNA, 16 bp, Homo sapiens
agggtgcgggtagagt

SEQ ID NO: 11377 - DNA, 16 bp, Homo sapiens
aagaaggccattggtg

SEQ ID NO: 11378 - DNA, 16 bp, Homo sapiens
cagtaggaggttccag

SEQ ID NO: 11379 - DNA, 16 bp, Homo sapiens
gatgaagtccggcagg

SEQ ID NO: 11380 - DNA, 16 bp, Homo sapiens
cgacacatgttattac

SEQ ID NO: 11381 - DNA, 16 bp, Homo sapiens
actgtgacggaaagac

SEQ ID NO: 11382 - DNA, 16 bp, Homo sapiens
gactcctcactttcgt

SEQ ID NO: 11383 - DNA, 16 bp, Homo sapiens
gcccgtatatttttgt

SEQ ID NO: 11384 - DNA, 16 bp, Homo sapiens
gacaattgttgttaac

SEQ ID NO: 11385 - DNA, 16 bp, Homo sapiens
cctatgctctgctccc

SEQ ID NO: 11386 - DNA, 16 bp, Homo sapiens
ggagaccctatatcct

SEQ ID NO: 11387 - DNA, 16 bp, Homo sapiens
ctgctgcagtatgtac

SEQ ID NO: 11388 - DNA, 25 bp, Homo sapiens
gttggaggaagcagataacattgct

SEQ ID NO: 11389 - DNA, 16 bp, Homo sapiens
acccttacctcaatca

SEQ ID NO: 11390 - DNA, 16 bp, Homo sapiens
atctcggccagttcgg

SEQ ID NO: 11391 - DNA, 18 bp, Homo sapiens
ttggagggatggagaggc

SEQ ID NO: 11392 - DNA, 16 bp, Homo sapiens
taatgtgagaaaatgc

SEQ ID NO: 11393 - DNA, 16 bp, Homo sapiens
gtagaccaccatctgc

SEQ ID NO: 11394 - DNA, 16 bp, Homo sapiens
caagtctagttttcag

SEQ ID NO: 11395 - DNA, 12 bp, Homo sapiens
tggcaataggac

SEQ ID NO: 11396 - DNA, 16 bp, Homo sapiens
ttacatccgggaacgg

SEQ ID NO: 11397 - DNA, 16 bp, Homo sapiens
caaggcctacggacca

SEQ ID NO: 11398 - DNA, 18 bp, Homo sapiens
cctttggctaccttgagt

SEQ ID NO: 11399 - DNA, 16 bp, Homo sapiens
gcgcaaaggggccctg

SEQ ID NO: 11400 - DNA, 16 bp, Homo sapiens
tgcttctgattagatc

SEQ ID NO: 11401 - DNA, 16 bp, Homo sapiens
ccaaacaggttggaaa

SEQ ID NO: 11402 - DNA, 16 bp, Homo sapiens
ctaagactggatggct

SEQ ID NO: 11403 - DNA, 16 bp, Homo sapiens
catcctacttttttac

SEQ ID NO: 11404 - DNA, 18 bp, Homo sapiens
ctccgactctgccaagta

SEQ ID NO: 11405 - DNA, 14 bp, Homo sapiens
atgtttaactgttc

SEQ ID NO: 11406 - DNA, 18 bp, Homo sapiens
tgacaccaggtattttga

SEQ ID NO: 11407 - DNA, 16 bp, Homo sapiens
ctttgctgaggtcgcc

SEQ ID NO: 11408 - DNA, 15 bp, Homo sapiens
gctgctacagatcaa

SEQ ID NO: 11409 - DNA, 16 bp, Homo sapiens
ccagcatcggatcacc

SEQ ID NO: 11410 - DNA, 16 bp, Homo sapiens
gatcagtgacttcttg

SEQ ID NO: 11411 - DNA, 16 bp, Homo sapiens
actcatgtaataatcc

SEQ ID NO: 11412 - DNA, 16 bp, Homo sapiens
gtgtaaattaagtcca

SEQ ID NO: 11413 - DNA, 16 bp, Homo sapiens
ttagagtgatgttgcc

SEQ ID NO: 11414 - DNA, 16 bp, Homo sapiens
aaaaaagtgtgccgag

SEQ ID NO: 11415 - DNA, 16 bp, Homo sapiens
agtgcaatggtaggca

SEQ ID NO: 11416 - DNA, 19 bp, Homo sapiens
gaaggtgtggggaagcatt

SEQ ID NO: 11417 - DNA, 16 bp, Homo sapiens
gtcttaggactggaca

SEQ ID NO: 11418 - DNA, 16 bp, Homo sapiens
ccactcctcgctcagt

SEQ ID NO: 11419 - DNA, 16 bp, Homo sapiens
tctgcctaagatgtgt

SEQ ID NO: 11420 - DNA, 16 bp, Homo sapiens
cgactatcaactcgct

SEQ ID NO: 11421 - DNA, 16 bp, Homo sapiens
aggtcctctcttctga

SEQ ID NO: 11422 - DNA, 16 bp, Homo sapiens
tagcaaattgttgtga

SEQ ID NO: 11423 - DNA, 18 bp, Homo sapiens
agacgagcacaccaggag

SEQ ID NO: 11424 - DNA, 16 bp, Homo sapiens
ccgtcacctcctaaaa

SEQ ID NO: 11425 - DNA, 18 bp, Homo sapiens
gaacaccttcagaaccgg

SEQ ID NO: 11426 - DNA, 16 bp, Homo sapiens
catgttctccttgact

SEQ ID NO: 11427 - DNA, 16 bp, Homo sapiens
cgagactgaggtttgc

SEQ ID NO: 11428 - DNA, 16 bp, Homo sapiens
ttcagaccttggttgc

SEQ ID NO: 11429 - DNA, 16 bp, Homo sapiens
gcccggagccgttggc

SEQ ID NO: 11430 - DNA, 12 bp, Homo sapiens
tgaccttgacat

SEQ ID NO: 11431 - DNA, 16 bp, Homo sapiens
agtgagcctataagtc

SEQ ID NO: 11432 - DNA, 23 bp, Homo sapiens
gatgttggaggtacctgctctgg

SEQ ID NO: 11433 - DNA, 16 bp, Homo sapiens
agggtgacaatattat

SEQ ID NO: 11434 - DNA, 16 bp, Homo sapiens
gccgtaggtaatacat

SEQ ID NO: 11435 - DNA, 16 bp, Homo sapiens
gctgcaaacaagtaat

SEQ ID NO: 11436 - DNA, 16 bp, Homo sapiens
taggagttataatagc

SEQ ID NO: 11437 - DNA, 16 bp, Homo sapiens
ggaaagcccatgtagg

SEQ ID NO: 11438 - DNA, 16 bp, Homo sapiens
acccatcaccatgtag

SEQ ID NO: 11439 - DNA, 16 bp, Homo sapiens
agggcggaagatggcc

SEQ ID NO: 11440 - DNA, 18 bp, Homo sapiens
actgcagagctgcagggc

SEQ ID NO: 11441 - DNA, 18 bp, Homo sapiens
tctggagtccatcatggc

SEQ ID NO: 11442 - DNA, 16 bp, Homo sapiens
gtgttgttttatcgtt

SEQ ID NO: 11443 - DNA, 16 bp, Homo sapiens
agctgagccgatccta

SEQ ID NO: 11444 - DNA, 16 bp, Homo sapiens
cgtgtccagtatatat

SEQ ID NO: 11445 - DNA, 22 bp, Homo sapiens
gtcagaacattgaatgcaactg

SEQ ID NO: 11446 - DNA, 16 bp, Homo sapiens
gtggtgcgtaatctca

SEQ ID NO: 11447 - DNA, 16 bp, Homo sapiens
aaagtctagaaaatta

SEQ ID NO: 11448 - DNA, 16 bp, Homo sapiens
agcagttgatctgcag

SEQ ID NO: 11449 - DNA, 18 bp, Homo sapiens
ttccttttggatctaagc

SEQ ID NO: 11450 - DNA, 16 bp, Homo sapiens
cccttctagtccattt

SEQ ID NO: 11451 - DNA, 18 bp, Homo sapiens
gagaattgggaacatgct

SEQ ID NO: 11452 - DNA, 16 bp, Homo sapiens
gaactttcggcccgac

SEQ ID NO: 11453 - DNA, 20 bp, Homo sapiens
cacttgcaaagggctctggt

SEQ ID NO: 11454 - DNA, 16 bp, Homo sapiens
gctcgactaggcctcg

SEQ ID NO: 11455 - DNA, 19 bp, Homo sapiens
agcattaaaggactgactg

SEQ ID NO: 11456 - DNA, 16 bp, Homo sapiens
cagtgctggataatag

SEQ ID NO: 11457 - DNA, 15 bp, Homo sapiens
agggtgacctactcg

SEQ ID NO: 11458 - DNA, 16 bp, Homo sapiens
ctgctgaaaaatggta

SEQ ID NO: 11459 - DNA, 20 bp, Homo sapiens
aacttgtcagaatttctttg

SEQ ID NO: 11460 - DNA, 12 bp, Homo sapiens
catggtcatgcc

SEQ ID NO: 11461 - DNA, 16 bp, Homo sapiens
gtgatgtgttccttgg

SEQ ID NO: 11462 - DNA, 16 bp, Homo sapiens
gcgaggccctctgcgc

SEQ ID NO: 11463 - DNA, 16 bp, Homo sapiens
gaacccaggctaggcg

SEQ ID NO: 11464 - DNA, 16 bp, Homo sapiens
aaacacaagattcagc

SEQ ID NO: 11465 - DNA, 16 bp, Homo sapiens
tgggacataattatcc

SEQ ID NO: 11466 - DNA, 16 bp, Homo sapiens
aaactggcagattaca

SEQ ID NO: 11467 - DNA, 20 bp, Homo sapiens
actgttactctggtgacaca

SEQ ID NO: 11468 - DNA, 16 bp, Homo sapiens
acacagctcagatggg

SEQ ID NO: 11469 - DNA, 16 bp, Homo sapiens
ttccctgagactaaca

SEQ ID NO: 11470 - DNA, 16 bp, Homo sapiens
tcctgccgtgccgtgc

SEQ ID NO: 11471 - DNA, 16 bp, Homo sapiens
gaccggcacctctccc

SEQ ID NO: 11472 - DNA, 16 bp, Homo sapiens
gcacagcccaaatgga

SEQ ID NO: 11473 - DNA, 14 bp, Homo sapiens
catctgctgccgga

SEQ ID NO: 11474 - DNA, 16 bp, Homo sapiens
tctggagctctccggg

SEQ ID NO: 11475 - DNA, 16 bp, Homo sapiens
gagatcctggtaagta

SEQ ID NO: 11476 - DNA, 15 bp, Homo sapiens
tcaagttagttttag

SEQ ID NO: 11477 - DNA, 16 bp, Homo sapiens
gtcacctcctaaaatc

SEQ ID NO: 11478 - DNA, 20 bp, Homo sapiens
tgttcatgagtttggagata

SEQ ID NO: 11479 - DNA, 21 bp, Homo sapiens
aatgctacagttattaatctg

SEQ ID NO: 11480 - DNA, 16 bp, Homo sapiens
tgaccactgtaagtgc

SEQ ID NO: 11481 - DNA, 20 bp, Homo sapiens
tccctgcgaccatgaggaga

SEQ ID NO: 11482 - DNA, 16 bp, Homo sapiens
tgcccaggccgtttcc

SEQ ID NO: 11483 - DNA, 14 bp, Homo sapiens
ggtggaaaaacacc

SEQ ID NO: 11484 - DNA, 16 bp, Homo sapiens
tggggggcacttggga

SEQ ID NO: 11485 - DNA, 12 bp, Homo sapiens
ggtgtagaggga

SEQ ID NO: 11486 - DNA, 20 bp, Homo sapiens
aggaaagtaatggaccagtg

SEQ ID NO: 11487 - DNA, 16 bp, Homo sapiens
tgcatatggcaaagta

SEQ ID NO: 11488 - DNA, 16 bp, Homo sapiens
acacaggaaacacatc

SEQ ID NO: 11489 - DNA, 16 bp, Homo sapiens
gctcctacctctaggc

SEQ ID NO: 11490 - DNA, 20 bp, Homo sapiens
gatcgcccaataaacattcc

SEQ ID NO: 11491 - DNA, 16 bp, Homo sapiens
gacacatgttattacc

SEQ ID NO: 11492 - DNA, 18 bp, Homo sapiens
gggcaagggcactttcgg

SEQ ID NO: 11493 - DNA, 18 bp, Homo sapiens
gaagctgagcaggtctta

SEQ ID NO: 11494 - DNA, 18 bp, Homo sapiens
ggtcccgtccgcctctcg

SEQ ID NO: 11495 - DNA, 16 bp, Homo sapiens
ggtagatgttgttacc

SEQ ID NO: 11496 - DNA, 16 bp, Homo sapiens
gcatatggcaaagtaa

SEQ ID NO: 11497 - DNA, 18 bp, Homo sapiens
accatctccagctattta

SEQ ID NO: 11498 - DNA, 16 bp, Homo sapiens
gctctttgttgtgcaa

SEQ ID NO: 11499 - DNA, 16 bp, Homo sapiens
ttaatgtcttcttgcg

SEQ ID NO: 11500 - DNA, 16 bp, Homo sapiens
tggccacggtcataaa

SEQ ID NO: 11501 - DNA, 16 bp, Homo sapiens
gaggtgtacatagtcc

SEQ ID NO: 11502 - DNA, 16 bp, Homo sapiens
tactctatcctttggg

SEQ ID NO: 11503 - DNA, 14 bp, Homo sapiens
ggataaagactgcc

SEQ ID NO: 11504 - DNA, 16 bp, Homo sapiens
cattagtttagtgcta

SEQ ID NO: 11505 - DNA, 16 bp, Homo sapiens
cacccactcctcgctc

SEQ ID NO: 11506 - DNA, 16 bp, Homo sapiens
gccaagaagttgtttg

SEQ ID NO: 11507 - DNA, 19 bp, Homo sapiens
ctcactgggatgaactagc

SEQ ID NO: 11508 - DNA, 16 bp, Homo sapiens
tcaatcgcatcttcca

SEQ ID NO: 11509 - DNA, 14 bp, Homo sapiens
tggctgttctctac

SEQ ID NO: 11510 - DNA, 20 bp, Homo sapiens
ccgcacactggtggtccatg

SEQ ID NO: 11511 - DNA, 17 bp, Homo sapiens
actgggatgaactagca

SEQ ID NO: 11512 - DNA, 18 bp, Homo sapiens
ttaccagttataggaaca

SEQ ID NO: 11513 - DNA, 16 bp, Homo sapiens
gagctgcaggattcct

SEQ ID NO: 11514 - DNA, 16 bp, Homo sapiens
gcaagtggtgatatga

SEQ ID NO: 11515 - DNA, 16 bp, Homo sapiens
ggccaaggaagtcgat

SEQ ID NO: 11516 - DNA, 16 bp, Homo sapiens
ggataagtctgtaccc

SEQ ID NO: 11517 - DNA, 16 bp, Homo sapiens
gcccagtgggctcggt

SEQ ID NO: 11518 - DNA, 18 bp, Homo sapiens
gagtgtgtggacagcgag

SEQ ID NO: 11519 - DNA, 16 bp, Homo sapiens
gtgtggctcgaagaca

SEQ ID NO: 11520 - DNA, 16 bp, Homo sapiens
gctaagtgacatttag

SEQ ID NO: 11521 - DNA, 16 bp, Homo sapiens
gagcaacggctacaga

SEQ ID NO: 11522 - DNA, 16 bp, Homo sapiens
aacatgcccgtatatt

SEQ ID NO: 11523 - DNA, 16 bp, Homo sapiens
agaacaccttctccat

SEQ ID NO: 11524 - DNA, 16 bp, Homo sapiens
tactgtacacattgag

SEQ ID NO: 11525 - DNA, 16 bp, Homo sapiens
ccacactacaaatacc

SEQ ID NO: 11526 - DNA, 20 bp, Homo sapiens
acctggaacatgacattgtt

SEQ ID NO: 11527 - DNA, 16 bp, Homo sapiens
tggccaaacggtgaag

SEQ ID NO: 11528 - DNA, 18 bp, Homo sapiens
caagtcctggtggagtcg

SEQ ID NO: 11529 - DNA, 20 bp, Homo sapiens
tgaataaaaaccctgtatgg

SEQ ID NO: 11530 - DNA, 16 bp, Homo sapiens
gcggggccggctatcc

SEQ ID NO: 11531 - DNA, 16 bp, Homo sapiens
gctgagccgtgtttgt

SEQ ID NO: 11532 - DNA, 16 bp, Homo sapiens
atgctgacagctgcat

SEQ ID NO: 11533 - DNA, 16 bp, Homo sapiens
tagcaggccagtggag

SEQ ID NO: 11534 - DNA, 16 bp, Homo sapiens
ggtgggtcgattgctg

SEQ ID NO: 11535 - DNA, 16 bp, Homo sapiens
accagtaagctcagtt

SEQ ID NO: 11536 - DNA, 20 bp, Homo sapiens
agaagccctaacgtgttatc

SEQ ID NO: 11537 - DNA, 18 bp, Homo sapiens
ctgctgctcggcacgggc

SEQ ID NO: 11538 - DNA, 16 bp, Homo sapiens
gatggagtcactagca

SEQ ID NO: 11539 - DNA, 16 bp, Homo sapiens
aaaagtgcttacttac

SEQ ID NO: 11540 - DNA, 16 bp, Homo sapiens
ggaaaacagtccaaac

SEQ ID NO: 11541 - DNA, 14 bp, Homo sapiens
cagccagataaatc

SEQ ID NO: 11542 - DNA, 16 bp, Homo sapiens
cccagtgggctcggta

SEQ ID NO: 11543 - DNA, 16 bp, Homo sapiens
ctgagtacacagtcag

SEQ ID NO: 11544 - DNA, 16 bp, Homo sapiens
tggctgccaaatgata

SEQ ID NO: 11545 - DNA, 16 bp, Homo sapiens
gtgtcactgcatatca

SEQ ID NO: 11546 - DNA, 16 bp, Homo sapiens
cccgggtatcaccaag

SEQ ID NO: 11547 - DNA, 16 bp, Homo sapiens
gcagccaaagatggga

SEQ ID NO: 11548 - DNA, 16 bp, Homo sapiens
gacaccgcactgcgca

SEQ ID NO: 11549 - DNA, 16 bp, Homo sapiens
tcgttgagggtcggcg

SEQ ID NO: 11550 - DNA, 20 bp, Homo sapiens
tctggatgctggtgatttgg

SEQ ID NO: 11551 - DNA, 20 bp, Homo sapiens
gaactgaccagatatgactg

SEQ ID NO: 11552 - DNA, 16 bp, Homo sapiens
ccagaacccttgacac

SEQ ID NO: 11553 - DNA, 18 bp, Homo sapiens
cagtcagaggcgctatgt

SEQ ID NO: 11554 - DNA, 16 bp, Homo sapiens
aaagttctcaatgcct

SEQ ID NO: 11555 - DNA, 16 bp, Homo sapiens
catcagccgggagagc

SEQ ID NO: 11556 - DNA, 16 bp, Homo sapiens
tatcaacttcccatta

SEQ ID NO: 11557 - DNA, 16 bp, Homo sapiens
gccgtttcccttgcgc

SEQ ID NO: 11558 - DNA, 16 bp, Homo sapiens
tcagagttacttattg

SEQ ID NO: 11559 - DNA, 16 bp, Homo sapiens
gcaagtgtctgtaggg

SEQ ID NO: 11560 - DNA, 20 bp, Homo sapiens
caagtcaccacaggacagta

SEQ ID NO: 11561 - DNA, 16 bp, Homo sapiens
ccctgatgggtgggcc

SEQ ID NO: 11562 - DNA, 12 bp, Homo sapiens
tttcttcagcca

SEQ ID NO: 11563 - DNA, 16 bp, Homo sapiens
atcgtcaccacttaca

SEQ ID NO: 11564 - DNA, 16 bp, Homo sapiens
ggcctcgaggggggcg

SEQ ID NO: 11565 - DNA, 18 bp, Homo sapiens
ccgtcatcctcttcctca

SEQ ID NO: 11566 - DNA, 16 bp, Homo sapiens
attaaccacacagcct

SEQ ID NO: 11567 - DNA, 20 bp, Homo sapiens
tcattattaggcatgttgga

SEQ ID NO: 11568 - DNA, 18 bp, Homo sapiens
atgctacgaccgcaggcg

SEQ ID NO: 11569 - DNA, 16 bp, Homo sapiens
gtacatagtccttccc

SEQ ID NO: 11570 - DNA, 20 bp, Homo sapiens
aattactcagagctttggat

SEQ ID NO: 11571 - DNA, 18 bp, Homo sapiens
ccttttgtgaagatcttg

SEQ ID NO: 11572 - DNA, 30 bp, Homo sapiens
ccaaactagaaatgccatcttccttgatgt

SEQ ID NO: 11573 - DNA, 16 bp, Homo sapiens
cctggggggtcttcgt

SEQ ID NO: 11574 - DNA, 16 bp, Homo sapiens
aggaagtgttgttgtg

SEQ ID NO: 11575 - DNA, 16 bp, Homo sapiens
cccggacctcatgtat

SEQ ID NO: 11576 - DNA, 20 bp, Homo sapiens
ccgggtcttgcgggtgccca

SEQ ID NO: 11577 - DNA, 21 bp, Homo sapiens
aacctgtggttactaaggaaa

SEQ ID NO: 11578 - DNA, 16 bp, Homo sapiens
ctgcgttggcctatgc

SEQ ID NO: 11579 - DNA, 16 bp, Homo sapiens
ccggtccacggtgccc

SEQ ID NO: 11580 - DNA, 16 bp, Homo sapiens
tcatgaggttaatacc

SEQ ID NO: 11581 - DNA, 16 bp, Homo sapiens
ttgatgcccaaattgg

SEQ ID NO: 11582 - DNA, 16 bp, Homo sapiens
tgacccttgtcattta

SEQ ID NO: 11583 - DNA, 16 bp, Homo sapiens
gcctgagaaccggatg

SEQ ID NO: 11584 - DNA, 16 bp, Homo sapiens
tgactgccgagtcact

SEQ ID NO: 11585 - DNA, 12 bp, Homo sapiens
gttgagccgctg

SEQ ID NO: 11586 - DNA, 16 bp, Homo sapiens
ttacaccgagtctcac

SEQ ID NO: 11587 - DNA, 16 bp, Homo sapiens
cagcggcaagcctggc

SEQ ID NO: 11588 - DNA, 16 bp, Homo sapiens
gtggagctatcaaaat

SEQ ID NO: 11589 - DNA, 16 bp, Homo sapiens
cgccagacactttgta

SEQ ID NO: 11590 - DNA, 20 bp, Homo sapiens
gtgcccgtgctgggaagctc

SEQ ID NO: 11591 - DNA, 14 bp, Homo sapiens
ggtgcgaagcagac

SEQ ID NO: 11592 - DNA, 16 bp, Homo sapiens
acagggggttaataac

SEQ ID NO: 11593 - DNA, 16 bp, Homo sapiens
caatcgcatcttccac

SEQ ID NO: 11594 - DNA, 16 bp, Homo sapiens
agtcaggaccgggctt

SEQ ID NO: 11595 - DNA, 16 bp, Homo sapiens
acatctatgaatttcc

SEQ ID NO: 11596 - DNA, 16 bp, Homo sapiens
caggtgtgctttgtcc

SEQ ID NO: 11597 - DNA, 18 bp, Homo sapiens
tgggaacatgctaaatac

SEQ ID NO: 11598 - DNA, 16 bp, Homo sapiens
gaccactgtaagtgcc

SEQ ID NO: 11599 - DNA, 16 bp, Homo sapiens
agaccagaattcattc

SEQ ID NO: 11600 - DNA, 16 bp, Homo sapiens
gccacacatataacac

SEQ ID NO: 11601 - DNA, 16 bp, Homo sapiens
gcgggcaccaagggcg

SEQ ID NO: 11602 - DNA, 18 bp, Homo sapiens
gtacgagcagaacaaggc

SEQ ID NO: 11603 - DNA, 16 bp, Homo sapiens
tttggactccattgca

SEQ ID NO: 11604 - DNA, 14 bp, Homo sapiens
ccacggccaacatc

SEQ ID NO: 11605 - DNA, 16 bp, Homo sapiens
gtgagatcgtctattt

SEQ ID NO: 11606 - DNA, 18 bp, Homo sapiens
ttggggagcagaatatca

SEQ ID NO: 11607 - DNA, 16 bp, Homo sapiens
gttccttgcgataagt

SEQ ID NO: 11608 - DNA, 16 bp, Homo sapiens
ttaggactggacattg

SEQ ID NO: 11609 - DNA, 12 bp, Homo sapiens
gtatagagcgtg

SEQ ID NO: 11610 - DNA, 16 bp, Homo sapiens
ggttcccagcctgcat

SEQ ID NO: 11611 - DNA, 16 bp, Homo sapiens
aatagcacttctttcc

SEQ ID NO: 11612 - DNA, 16 bp, Homo sapiens
agtgcctgcactctgt

SEQ ID NO: 11613 - DNA, 16 bp, Homo sapiens
ggagcttgggatagtt

SEQ ID NO: 11614 - DNA, 16 bp, Homo sapiens
taggctgattttatgg

SEQ ID NO: 11615 - DNA, 18 bp, Homo sapiens
agccgatggacacaaaca

SEQ ID NO: 11616 - DNA, 19 bp, Homo sapiens
tgacctgtattttgccaga

SEQ ID NO: 11617 - DNA, 16 bp, Homo sapiens
agcggttcccatttga

SEQ ID NO: 11618 - DNA, 16 bp, Homo sapiens
accttccgtgatgaac

SEQ ID NO: 11619 - DNA, 16 bp, Homo sapiens
agataacccgattttg

SEQ ID NO: 11620 - DNA, 16 bp, Homo sapiens
ccgagatgaatcatat

SEQ ID NO: 11621 - DNA, 16 bp, Homo sapiens
ggggcagcccattttt

SEQ ID NO: 11622 - DNA, 16 bp, Homo sapiens
agaccttggttgccag

SEQ ID NO: 11623 - DNA, 16 bp, Homo sapiens
gcacggagcgaggttc

SEQ ID NO: 11624 - DNA, 16 bp, Homo sapiens
agaatctttaatgacc

SEQ ID NO: 11625 - DNA, 16 bp, Homo sapiens
accactgcattaatat

SEQ ID NO: 11626 - DNA, 16 bp, Homo sapiens
ggaagtatacatactg

SEQ ID NO: 11627 - DNA, 16 bp, Homo sapiens
caagctgaaagagccc

SEQ ID NO: 11628 - DNA, 16 bp, Homo sapiens
cgggacttgttaaagt

SEQ ID NO: 11629 - DNA, 16 bp, Homo sapiens
tccaagccaataatga

SEQ ID NO: 11630 - DNA, 16 bp, Homo sapiens
cctctgcagtctcccg

SEQ ID NO: 11631 - DNA, 20 bp, Homo sapiens
ctgtatggcacttattatga

SEQ ID NO: 11632 - DNA, 16 bp, Homo sapiens
agcctcaccacttggg

SEQ ID NO: 11633 - DNA, 16 bp, Homo sapiens
cgcggcgcaggagctt

SEQ ID NO: 11634 - DNA, 19 bp, Homo sapiens
tttgccagacttaaatcac

SEQ ID NO: 11635 - DNA, 16 bp, Homo sapiens
atacaaggcagtggct

SEQ ID NO: 11636 - DNA, 20 bp, Homo sapiens
tacaacactctgaaccctga

SEQ ID NO: 11637 - DNA, 16 bp, Homo sapiens
gttccgtcacctccta

SEQ ID NO: 11638 - DNA, 18 bp, Homo sapiens
cagtctgtgaaccatgga

SEQ ID NO: 11639 - DNA, 20 bp, Homo sapiens
tttttacaggtccatgaaaa

SEQ ID NO: 11640 - DNA, 16 bp, Homo sapiens
ctgaacctcagtccac

SEQ ID NO: 11641 - DNA, 16 bp, Homo sapiens
gagggtgacaatatta

SEQ ID NO: 11642 - DNA, 16 bp, Homo sapiens
caggaccgggcttttc

SEQ ID NO: 11643 - DNA, 16 bp, Homo sapiens
gggaccaccactgtgt

SEQ ID NO: 11644 - DNA, 16 bp, Homo sapiens
gtggggtactatgaat

SEQ ID NO: 11645 - DNA, 16 bp, Homo sapiens
tcacatcccacaagac

SEQ ID NO: 11646 - DNA, 20 bp, Homo sapiens
gaccatgaggaaatgagaga

SEQ ID NO: 11647 - DNA, 16 bp, Homo sapiens
tgttactgttggtaag

SEQ ID NO: 11648 - DNA, 20 bp, Homo sapiens
tgtgagaccaactggggcgg

SEQ ID NO: 11649 - DNA, 16 bp, Homo sapiens
tcctatgctctgctcc

SEQ ID NO: 11650 - DNA, 19 bp, Homo sapiens
ctggtgacacaacctgtgg

SEQ ID NO: 11651 - DNA, 18 bp, Homo sapiens
ccagcggtcggagcggag

SEQ ID NO: 11652 - DNA, 16 bp, Homo sapiens
agcttgatagcttgag

SEQ ID NO: 11653 - DNA, 20 bp, Homo sapiens
cctgcctttgcttccagcag

SEQ ID NO: 11654 - DNA, 16 bp, Homo sapiens
tgggctctttcaggcc

SEQ ID NO: 11655 - DNA, 20 bp, Homo sapiens
attaactcagtttgaactaa

SEQ ID NO: 11656 - DNA, 16 bp, Homo sapiens
cctcccgtctctggtc

SEQ ID NO: 11657 - DNA, 16 bp, Homo sapiens
aggcaacactaattga

SEQ ID NO: 11658 - DNA, 16 bp, Homo sapiens
gtaggtacttttagag

SEQ ID NO: 11659 - DNA, 16 bp, Homo sapiens
acctctcaaaaaccca

SEQ ID NO: 11660 - DNA, 20 bp, Homo sapiens
atttttggctagggagttta

SEQ ID NO: 11661 - DNA, 20 bp, Homo sapiens
agagggtggaagccattagg

SEQ ID NO: 11662 - DNA, 15 bp, Homo sapiens
aagtctagaaaatta

SEQ ID NO: 11663 - DNA, 16 bp, Homo sapiens
ggagtaggtagatttc

SEQ ID NO: 11664 - DNA, 16 bp, Homo sapiens
ggctaagtgattaagg

SEQ ID NO: 11665 - DNA, 16 bp, Homo sapiens
agacggaagcccggct

SEQ ID NO: 11666 - DNA, 16 bp, Homo sapiens
acttgaccctcatcga

SEQ ID NO: 11667 - DNA, 16 bp, Homo sapiens
cctgggtgggaatgcc

SEQ ID NO: 11668 - DNA, 14 bp, Homo sapiens
cagacattccaagg

SEQ ID NO: 11669 - DNA, 14 bp, Homo sapiens
gacttccatgtacc

SEQ ID NO: 11670 - DNA, 16 bp, Homo sapiens
tggggacttgctggca

SEQ ID NO: 11671 - DNA, 20 bp, Homo sapiens
agactccgagaacatgacca

SEQ ID NO: 11672 - DNA, 16 bp, Homo sapiens
aggtgtctctattgcg

SEQ ID NO: 11673 - DNA, 16 bp, Homo sapiens
ccactgcattaatatg

SEQ ID NO: 11674 - DNA, 16 bp, Homo sapiens
gttgtctgtcattagt

SEQ ID NO: 11675 - DNA, 16 bp, Homo sapiens
cacataccataatacc

SEQ ID NO: 11676 - DNA, 20 bp, Homo sapiens
gttaatcatataataatgat

SEQ ID NO: 11677 - DNA, 20 bp, Homo sapiens
aagccttggagggtttcatt

SEQ ID NO: 11678 - DNA, 18 bp, Homo sapiens
tgctttgagaacgtgaca

SEQ ID NO: 11679 - DNA, 16 bp, Homo sapiens
cccttccgcctaccag

SEQ ID NO: 11680 - DNA, 16 bp, Homo sapiens
ggacattcaaggtaaa

SEQ ID NO: 11681 - DNA, 16 bp, Homo sapiens
gcagtcctacatcaac

SEQ ID NO: 11682 - DNA, 16 bp, Homo sapiens
cccggccaggatatgt

SEQ ID NO: 11683 - DNA, 16 bp, Homo sapiens
ctgtccctatcatgct

SEQ ID NO: 11684 - DNA, 19 bp, Homo sapiens
catggattccatgttcatg

SEQ ID NO: 11685 - DNA, 16 bp, Homo sapiens
cggtattagttttttg

SEQ ID NO: 11686 - DNA, 16 bp, Homo sapiens
ggaggaataagtgggc

SEQ ID NO: 11687 - DNA, 16 bp, Homo sapiens
tggctttggatatgca

SEQ ID NO: 11688 - DNA, 20 bp, Homo sapiens
agtaggaattatttagcatg

SEQ ID NO: 11689 - DNA, 16 bp, Homo sapiens
ccctgcctagaaataa

SEQ ID NO: 11690 - DNA, 16 bp, Homo sapiens
tggtgtgccaatagtg

SEQ ID NO: 11691 - DNA, 16 bp, Homo sapiens
ctggtgtggttctgtt

SEQ ID NO: 11692 - DNA, 20 bp, Homo sapiens
tggtagccacaattgcacaa

SEQ ID NO: 11693 - DNA, 20 bp, Homo sapiens
agcagaaacctactgcaggg

SEQ ID NO: 11694 - DNA, 16 bp, Homo sapiens
tgggcctgtaaatcac

SEQ ID NO: 11695 - DNA, 20 bp, Homo sapiens
ggcgaagtaaagaatctgaa

SEQ ID NO: 11696 - DNA, 14 bp, Homo sapiens
aacaccactgccaa

SEQ ID NO: 11697 - DNA, 16 bp, Homo sapiens
gcctcatccatttgtc

SEQ ID NO: 11698 - DNA, 16 bp, Homo sapiens
ccctactcttctgttg

SEQ ID NO: 11699 - DNA, 16 bp, Homo sapiens
tgtttgctcagaaggc

SEQ ID NO: 11700 - DNA, 18 bp, Homo sapiens
ataatcctatttcatctg

SEQ ID NO: 11701 - DNA, 16 bp, Homo sapiens
ggggctcccttttgct

SEQ ID NO: 11702 - DNA, 16 bp, Homo sapiens
ggtcgagcctactccc

SEQ ID NO: 11703 - DNA, 20 bp, Homo sapiens
tttcttaaaggaaagtaatg

SEQ ID NO: 11704 - DNA, 12 bp, Homo sapiens
tttgaccacagt

SEQ ID NO: 11705 - DNA, 16 bp, Homo sapiens
caaacaggttggaaaa

SEQ ID NO: 11706 - DNA, 16 bp, Homo sapiens
cctcgttcctccgagc

SEQ ID NO: 11707 - DNA, 25 bp, Homo sapiens
caaaaggagatatcaagaggatgga

SEQ ID NO: 11708 - DNA, 19 bp, Homo sapiens
ttttcagagttgctttaaa

SEQ ID NO: 11709 - DNA, 14 bp, Homo sapiens
ctgtaccacaccat

SEQ ID NO: 11710 - DNA, 16 bp, Homo sapiens
gtgtctattaaaaccc

SEQ ID NO: 11711 - DNA, 16 bp, Homo sapiens
cgaatcaatcgcatct

SEQ ID NO: 11712 - DNA, 16 bp, Homo sapiens
caaccgactatcaact

SEQ ID NO: 11713 - DNA, 20 bp, Homo sapiens
atccaggaatgctacgaccg

SEQ ID NO: 11714 - DNA, 16 bp, Homo sapiens
tgggtactctttagcc

SEQ ID NO: 11715 - DNA, 16 bp, Homo sapiens
ggggcgtgagatgggc

SEQ ID NO: 11716 - DNA, 16 bp, Homo sapiens
tcctttctgagtgtac

SEQ ID NO: 11717 - DNA, 18 bp, Homo sapiens
tttacaacattcaacttt

SEQ ID NO: 11718 - DNA, 16 bp, Homo sapiens
tcctcataggatggtc

SEQ ID NO: 11719 - DNA, 16 bp, Homo sapiens
gggtgactcttttccc

SEQ ID NO: 11720 - DNA, 20 bp, Homo sapiens
ccttccgatggaagcactag

SEQ ID NO: 11721 - DNA, 16 bp, Homo sapiens
agagtggaattttagc

SEQ ID NO: 11722 - DNA, 16 bp, Homo sapiens
tcctctgacaaaagcc

SEQ ID NO: 11723 - DNA, 20 bp, Homo sapiens
ctgggaagctccacgctcct

SEQ ID NO: 11724 - DNA, 16 bp, Homo sapiens
accgactatcaactcg

SEQ ID NO: 11725 - DNA, 16 bp, Homo sapiens
aagaggcgaagttcct

SEQ ID NO: 11726 - DNA, 16 bp, Homo sapiens
atactcctcggcagac

SEQ ID NO: 11727 - DNA, 16 bp, Homo sapiens
tattgcctcggattag

SEQ ID NO: 11728 - DNA, 18 bp, Homo sapiens
cgtccctactgtctttga

SEQ ID NO: 11729 - DNA, 16 bp, Homo sapiens
ggtgggtggttcgccc

SEQ ID NO: 11730 - DNA, 16 bp, Homo sapiens
tccagactttagtatc

SEQ ID NO: 11731 - DNA, 20 bp, Homo sapiens
agtaggaattggaacattat

SEQ ID NO: 11732 - DNA, 16 bp, Homo sapiens
atgcaacactttgaac

SEQ ID NO: 11733 - DNA, 16 bp, Homo sapiens
ctgggggggactctac

SEQ ID NO: 11734 - DNA, 16 bp, Homo sapiens
cggccaggatatgtac

SEQ ID NO: 11735 - DNA, 16 bp, Homo sapiens
aggtgttgatattcta

SEQ ID NO: 11736 - DNA, 16 bp, Homo sapiens
cttcagctccatcggc

SEQ ID NO: 11737 - DNA, 16 bp, Homo sapiens
tagaagcctcaattga

SEQ ID NO: 11738 - DNA, 16 bp, Homo sapiens
gatttgctccatctat

SEQ ID NO: 11739 - DNA, 16 bp, Homo sapiens
gtctgcctcattggtg

SEQ ID NO: 11740 - DNA, 16 bp, Homo sapiens
ggtccgcaggcttgtg

SEQ ID NO: 11741 - DNA, 16 bp, Homo sapiens
ggcatggacattcaag

SEQ ID NO: 11742 - DNA, 16 bp, Homo sapiens
ggtgaacagttaaatg

SEQ ID NO: 11743 - DNA, 16 bp, Homo sapiens
cctgctgtggcttgcg

SEQ ID NO: 11744 - DNA, 16 bp, Homo sapiens
atccgcgacctcatgc

SEQ ID NO: 11745 - DNA, 16 bp, Homo sapiens
ctatgctctgctccct

SEQ ID NO: 11746 - DNA, 18 bp, Homo sapiens
cacctgtgatctgttctt

SEQ ID NO: 11747 - DNA, 16 bp, Homo sapiens
gaacttgcagtaagcg

SEQ ID NO: 11748 - DNA, 16 bp, Homo sapiens
caccagccctctacca

SEQ ID NO: 11749 - DNA, 16 bp, Homo sapiens
caagcgtgttgtttgt

SEQ ID NO: 11750 - DNA, 16 bp, Homo sapiens
ggcaacactaattgat

SEQ ID NO: 11751 - DNA, 18 bp, Homo sapiens
caccgacacggagaacat

SEQ ID NO: 11752 - DNA, 16 bp, Homo sapiens
gctagttgatctagca

SEQ ID NO: 11753 - DNA, 16 bp, Homo sapiens
agtgagtgccatgaga

SEQ ID NO: 11754 - DNA, 20 bp, Homo sapiens
cccagtcagaggcgctatgt

SEQ ID NO: 11755 - DNA, 16 bp, Homo sapiens
agggagcatcatggag

SEQ ID NO: 11756 - DNA, 16 bp, Homo sapiens
tattgctccctcggca

SEQ ID NO: 11757 - DNA, 16 bp, Homo sapiens
cctaacccagatagct

SEQ ID NO: 11758 - DNA, 20 bp, Homo sapiens
aagttgcatttagtgatctt

SEQ ID NO: 11759 - DNA, 20 bp, Homo sapiens
gaaggccgtgtgcgtgctga

SEQ ID NO: 11760 - DNA, 16 bp, Homo sapiens
gctgcatatggcaaag

SEQ ID NO: 11761 - DNA, 16 bp, Homo sapiens
tcccattagcaggagc

SEQ ID NO: 11762 - DNA, 18 bp, Homo sapiens
cctgtgagcagccgcggg

SEQ ID NO: 11763 - DNA, 16 bp, Homo sapiens
ctgggtgaaaattgat

SEQ ID NO: 11764 - DNA, 16 bp, Homo sapiens
cctggcttgtctgcgg

SEQ ID NO: 11765 - DNA, 16 bp, Homo sapiens
cttaagtgccctagta

SEQ ID NO: 11766 - DNA, 19 bp, Homo sapiens
acaataaataccgaggtga

SEQ ID NO: 11767 - DNA, 16 bp, Homo sapiens
aagtccggcaggagat

SEQ ID NO: 11768 - DNA, 16 bp, Homo sapiens
gtcctacatcaacacg

SEQ ID NO: 11769 - DNA, 16 bp, Homo sapiens
caaaattaatctggcg

SEQ ID NO: 11770 - DNA, 14 bp, Homo sapiens
accacaaagtgcaa

SEQ ID NO: 11771 - DNA, 19 bp, Homo sapiens
acaataaataccgaggtga

SEQ ID NO: 11772 - DNA, 16 bp, Homo sapiens
tccttcccggccatat

SEQ ID NO: 11773 - DNA, 20 bp, Homo sapiens
gtatcccacttgaacctgga

SEQ ID NO: 11774 - DNA, 16 bp, Homo sapiens
agctgcaagtattcct

SEQ ID NO: 11775 - DNA, 16 bp, Homo sapiens
gaagagcggccgagtg

SEQ ID NO: 11776 - DNA, 18 bp, Homo sapiens
tcaaagtagagttcttcc

SEQ ID NO: 11777 - DNA, 16 bp, Homo sapiens
ggcggaagcgtgtaaa

SEQ ID NO: 11778 - DNA, 16 bp, Homo sapiens
ggccaggcccgttcta

SEQ ID NO: 11779 - DNA, 12 bp, Homo sapiens
gtagagggaaca

SEQ ID NO: 11780 - DNA, 16 bp, Homo sapiens
gtcaagtgtactgttc

SEQ ID NO: 11781 - DNA, 25 bp, Homo sapiens
gaagcagataacattgctagtatcc

SEQ ID NO: 11782 - DNA, 12 bp, Homo sapiens
tcttcaccatgg

SEQ ID NO: 11783 - DNA, 18 bp, Homo sapiens
gtgttggagaagcttttc

SEQ ID NO: 11784 - DNA, 16 bp, Homo sapiens
gggcaggccttctata

SEQ ID NO: 11785 - DNA, 16 bp, Homo sapiens
aaccctcacactgggc

SEQ ID NO: 11786 - DNA, 20 bp, Homo sapiens
aggaagggcagagaatggct

SEQ ID NO: 11787 - DNA, 15 bp, Homo sapiens
cagaggctagcagtt

SEQ ID NO: 11788 - DNA, 16 bp, Homo sapiens
tgggctcggtagtgcc

SEQ ID NO: 11789 - DNA, 18 bp, Homo sapiens
cgttgaccgcatcgccac

SEQ ID NO: 11790 - DNA, 16 bp, Homo sapiens
cgccgagggcttgggc

SEQ ID NO: 11791 - DNA, 20 bp, Homo sapiens
aaggaggagcccgaggagct

SEQ ID NO: 11792 - DNA, 16 bp, Homo sapiens
gaaagggagtaaggct

SEQ ID NO: 11793 - DNA, 16 bp, Homo sapiens
tcctcctcgctgtttt

SEQ ID NO: 11794 - DNA, 14 bp, Homo sapiens
tccaatgttcagtg

SEQ ID NO: 11795 - DNA, 16 bp, Homo sapiens
ggaccgggcttttcac

SEQ ID NO: 11796 - DNA, 16 bp, Homo sapiens
gtctgggaacttttag

SEQ ID NO: 11797 - DNA, 12 bp, Homo sapiens
gtagagttcttc

SEQ ID NO: 11798 - DNA, 16 bp, Homo sapiens
aaatccagaggctaaa

SEQ ID NO: 11799 - DNA, 16 bp, Homo sapiens
agtccaaaaagtttac

SEQ ID NO: 11800 - DNA, 16 bp, Homo sapiens
taacaccatgaatatg

SEQ ID NO: 11801 - DNA, 18 bp, Homo sapiens
cctggagttgtttctgca

SEQ ID NO: 11802 - DNA, 16 bp, Homo sapiens
gttcagccctatagct

SEQ ID NO: 11803 - DNA, 16 bp, Homo sapiens
aggccttctataagtg

SEQ ID NO: 11804 - DNA, 16 bp, Homo sapiens
gccaggccggatctga

SEQ ID NO: 11805 - DNA, 16 bp, Homo sapiens
ggttgcgagaggagac

SEQ ID NO: 11806 - DNA, 18 bp, Homo sapiens
tggctggaagctaaggaa

SEQ ID NO: 11807 - DNA, 16 bp, Homo sapiens
caggagatcgcttaaa

SEQ ID NO: 11808 - DNA, 16 bp, Homo sapiens
ggcctgttataaatgg

SEQ ID NO: 11809 - DNA, 16 bp, Homo sapiens
tcaatctgtgattcgg

SEQ ID NO: 11810 - DNA, 16 bp, Homo sapiens
gctgctcacttggtcc

SEQ ID NO: 11811 - DNA, 20 bp, Homo sapiens
gatcatctgaccaaaactca

SEQ ID NO: 11812 - DNA, 16 bp, Homo sapiens
atattaaccacacagc

SEQ ID NO: 11813 - DNA, 14 bp, Homo sapiens
gtggctggtaacct

SEQ ID NO: 11814 - DNA, 16 bp, Homo sapiens
ttgcctccacatatat

SEQ ID NO: 11815 - DNA, 16 bp, Homo sapiens
cagtctgtgcttgcgc

SEQ ID NO: 11816 - DNA, 14 bp, Homo sapiens
ctagcagttcaact

SEQ ID NO: 11817 - DNA, 16 bp, Homo sapiens
gccggccagtatggag

SEQ ID NO: 11818 - DNA, 16 bp, Homo sapiens
gcgtgtttgccaacag

SEQ ID NO: 11819 - DNA, 16 bp, Homo sapiens
agccctataataaact

SEQ ID NO: 11820 - DNA, 16 bp, Homo sapiens
gagactttcattgaga

SEQ ID NO: 11821 - DNA, 16 bp, Homo sapiens
aactactcatttgtgg

SEQ ID NO: 11822 - DNA, 12 bp, Homo sapiens
tgaccttacaca

SEQ ID NO: 11823 - DNA, 16 bp, Homo sapiens
ttgatgtagcttgttc

SEQ ID NO: 11824 - DNA, 16 bp, Homo sapiens
tccagacaaccgacta

SEQ ID NO: 11825 - DNA, 16 bp, Homo sapiens
gttgtaacaattctgt

SEQ ID NO: 11826 - DNA, 18 bp, Homo sapiens
ctactgtctttgagaact

SEQ ID NO: 11827 - DNA, 18 bp, Homo sapiens
cgctggcccgatcttcag

SEQ ID NO: 11828 - DNA, 16 bp, Homo sapiens
gtagtgcccagctggc

SEQ ID NO: 11829 - DNA, 16 bp, Homo sapiens
aacagttgatattcac

SEQ ID NO: 11830 - DNA, 16 bp, Homo sapiens
aggcgggcctcttggc

SEQ ID NO: 11831 - DNA, 18 bp, Homo sapiens
actgaccactattggagc

SEQ ID NO: 11832 - DNA, 14 bp, Homo sapiens
aattactgacatgt

SEQ ID NO: 11833 - DNA, 16 bp, Homo sapiens
ttcatgttgcttcccg

SEQ ID NO: 11834 - DNA, 16 bp, Homo sapiens
tggttgtcttagtcac

SEQ ID NO: 11835 - DNA, 16 bp, Homo sapiens
cttggccacagtgtgc

SEQ ID NO: 11836 - DNA, 16 bp, Homo sapiens
acacacctgtcattca

SEQ ID NO: 11837 - DNA, 20 bp, Homo sapiens
acccagagcgaggctgggag

SEQ ID NO: 11838 - DNA, 16 bp, Homo sapiens
aagagagacaattgcc

SEQ ID NO: 11839 - DNA, 16 bp, Homo sapiens
cgttacacacttaagc

SEQ ID NO: 11840 - DNA, 14 bp, Homo sapiens
ggccttactgatca

SEQ ID NO: 11841 - DNA, 16 bp, Homo sapiens
gcccgccaacatggac

SEQ ID NO: 11842 - DNA, 16 bp, Homo sapiens
cggcgaccgtgaggcc

SEQ ID NO: 11843 - DNA, 16 bp, Homo sapiens
cttgacaccatcctga

SEQ ID NO: 11844 - DNA, 22 bp, Homo sapiens
ccagttggaagaactcattacc

SEQ ID NO: 11845 - DNA, 12 bp, Homo sapiens
gacttgaaggtg

SEQ ID NO: 11846 - DNA, 20 bp, Homo sapiens
cctcagctcctcagtgcaca

SEQ ID NO: 11847 - DNA, 16 bp, Homo sapiens
ggaacgggaggggaga

SEQ ID NO: 11848 - DNA, 16 bp, Homo sapiens
ttgggctgacttgttg

SEQ ID NO: 11849 - DNA, 16 bp, Homo sapiens
tgattgctggatgact

SEQ ID NO: 11850 - DNA, 16 bp, Homo sapiens
gtattgctccctcggc

SEQ ID NO: 11851 - DNA, 16 bp, Homo sapiens
gcattaccctgtgtct

SEQ ID NO: 11852 - DNA, 25 bp, Homo sapiens
agaacaccttcagaaccggaggcaa

SEQ ID NO: 11853 - DNA, 16 bp, Homo sapiens
gtatatcaacttccca

SEQ ID NO: 11854 - DNA, 16 bp, Homo sapiens
cagagcgtgtttgcca

SEQ ID NO: 11855 - DNA, 20 bp, Homo sapiens
cacctctggacttgcctttc

SEQ ID NO: 11856 - DNA, 16 bp, Homo sapiens
ggctggcctcgttaag

SEQ ID NO: 11857 - DNA, 16 bp, Homo sapiens
gggagcaccactgtca

SEQ ID NO: 11858 - DNA, 16 bp, Homo sapiens
tgctggacatttatga

SEQ ID NO: 11859 - DNA, 16 bp, Homo sapiens
ccagtggcaatttgtc

SEQ ID NO: 11860 - DNA, 19 bp, Homo sapiens
acgctggaagtcgtttggc

SEQ ID NO: 11861 - DNA, 16 bp, Homo sapiens
gagcggttccgtcacc

SEQ ID NO: 11862 - DNA, 16 bp, Homo sapiens
gtggggacccatcact

SEQ ID NO: 11863 - DNA, 20 bp, Homo sapiens
atgacttgggcaaaggtgga

SEQ ID NO: 11864 - DNA, 16 bp, Homo sapiens
ggagtgaacactgcag

SEQ ID NO: 11865 - DNA, 16 bp, Homo sapiens
gatacatttacttgtt

SEQ ID NO: 11866 - DNA, 16 bp, Homo sapiens
tggctgtgttatgtgg

SEQ ID NO: 11867 - DNA, 18 bp, Homo sapiens
cagcgcgaccagatcaat

SEQ ID NO: 11868 - DNA, 16 bp, Homo sapiens
aaccgcctgcctgaac

SEQ ID NO: 11869 - DNA, 16 bp, Homo sapiens
taacccttacctcaat

SEQ ID NO: 11870 - DNA, 16 bp, Homo sapiens
tcaaaccgtcaaatgt

SEQ ID NO: 11871 - DNA, 21 bp, Homo sapiens
aaaataaagacaaagccaacc

SEQ ID NO: 11872 - DNA, 20 bp, Homo sapiens
ttattatgaggctattaaaa

SEQ ID NO: 11873 - DNA, 16 bp, Homo sapiens
ggtgggcgtatatccc

SEQ ID NO: 11874 - DNA, 20 bp, Homo sapiens
gggacggtcatctacaaccc

SEQ ID NO: 11875 - DNA, 16 bp, Homo sapiens
ttgaccctcatcgacc

SEQ ID NO: 11876 - DNA, 16 bp, Homo sapiens
agcatttgccattggg

SEQ ID NO: 11877 - DNA, 18 bp, Homo sapiens
gccgtgtgcgtgctgaag

SEQ ID NO: 11878 - DNA, 15 bp, Homo sapiens
cactgggatgaacta

SEQ ID NO: 11879 - DNA, 25 bp, Homo sapiens
cagttggaagaactcattaccgctg

SEQ ID NO: 11880 - DNA, 20 bp, Homo sapiens
gaaatgaagaaagtacaaag

SEQ ID NO: 11881 - DNA, 16 bp, Homo sapiens
gagcgcaggcctaccc

SEQ ID NO: 11882 - DNA, 16 bp, Homo sapiens
aacatcagcctgatga

SEQ ID NO: 11883 - DNA, 16 bp, Homo sapiens
ttgggcctgtaaatca

SEQ ID NO: 11884 - DNA, 16 bp, Homo sapiens
gtctaggagttaaagc

SEQ ID NO: 11885 - DNA, 16 bp, Homo sapiens
ctgcatatggcaaagt

SEQ ID NO: 11886 - DNA, 16 bp, Homo sapiens
agctgcccgcctgctc

SEQ ID NO: 11887 - DNA, 16 bp, Homo sapiens
tggactctctctgcgc

SEQ ID NO: 11888 - DNA, 18 bp, Homo sapiens
cgagcagaacaaggccaa

SEQ ID NO: 11889 - DNA, 16 bp, Homo sapiens
ccagaggggggtttaa

SEQ ID NO: 11890 - DNA, 18 bp, Homo sapiens
cctcatcgtcttcagcaa

SEQ ID NO: 11891 - DNA, 16 bp, Homo sapiens
ttggtttcgtattttc

SEQ ID NO: 11892 - DNA, 16 bp, Homo sapiens
agcacaccctgtgata

SEQ ID NO: 11893 - DNA, 20 bp, Homo sapiens
tgaggtgaacgtgcccgtgc

SEQ ID NO: 11894 - DNA, 16 bp, Homo sapiens
aaaagttgtgacggcc

SEQ ID NO: 11895 - DNA, 19 bp, Homo sapiens
cataaagtctagaaaatta

SEQ ID NO: 11896 - DNA, 14 bp, Homo sapiens
tcaggacccgctac

SEQ ID NO: 11897 - DNA, 14 bp, Homo sapiens
ttgacaatgattta

SEQ ID NO: 11898 - DNA, 16 bp, Homo sapiens
taacaaaggtagttgc

SEQ ID NO: 11899 - DNA, 18 bp, Homo sapiens
ttaatcagtggctaacag

SEQ ID NO: 11900 - DNA, 16 bp, Homo sapiens
ttcagctccatcggcc

SEQ ID NO: 11901 - DNA, 14 bp, Homo sapiens
agagcaatattcta

SEQ ID NO: 11902 - DNA, 18 bp, Homo sapiens
cctctacaagtacgagca

SEQ ID NO: 11903 - DNA, 16 bp, Homo sapiens
tctttgcagaattacc

SEQ ID NO: 11904 - DNA, 16 bp, Homo sapiens
tgaaaaacggctcagt

SEQ ID NO: 11905 - DNA, 16 bp, Homo sapiens
aagtccaaaaagttta

SEQ ID NO: 11906 - DNA, 16 bp, Homo sapiens
ttacctcaatcaagat

SEQ ID NO: 11907 - DNA, 16 bp, Homo sapiens
atccgcccagccgagc

SEQ ID NO: 11908 - DNA, 16 bp, Homo sapiens
taaggaaccttataga

SEQ ID NO: 11909 - DNA, 16 bp, Homo sapiens
ccatccctgctcgact

SEQ ID NO: 11910 - DNA, 16 bp, Homo sapiens
gcaccgtttcctgcca

SEQ ID NO: 11911 - DNA, 16 bp, Homo sapiens
gcactcacatccagcc

SEQ ID NO: 11912 - DNA, 18 bp, Homo sapiens
gggtattggcagctgagg

SEQ ID NO: 11913 - DNA, 20 bp, Homo sapiens
aagttaactgagctttttct

SEQ ID NO: 11914 - DNA, 16 bp, Homo sapiens
gtcgtcaagctgaaag

SEQ ID NO: 11915 - DNA, 18 bp, Homo sapiens
cttgagtcatggaaggag

SEQ ID NO: 11916 - DNA, 16 bp, Homo sapiens
gagttgctcattatat

SEQ ID NO: 11917 - DNA, 18 bp, Homo sapiens
acagccgagtaaatgtgt

SEQ ID NO: 11918 - DNA, 16 bp, Homo sapiens
ccgcccagccgagcca

SEQ ID NO: 11919 - DNA, 16 bp, Homo sapiens
agtgagcttatacatg

SEQ ID NO: 11920 - DNA, 16 bp, Homo sapiens
tctctattgcggtccc

SEQ ID NO: 11921 - DNA, 16 bp, Homo sapiens
ttagcgaccagtgtgc

SEQ ID NO: 11922 - DNA, 12 bp, Homo sapiens
tcgacaaggctg

SEQ ID NO: 11923 - DNA, 20 bp, Homo sapiens
ggatgaagagaggcatgttg

SEQ ID NO: 11924 - DNA, 20 bp, Homo sapiens
actacagggagaaaatccag

SEQ ID NO: 11925 - DNA, 16 bp, Homo sapiens
gcagtgtaccagtaag

SEQ ID NO: 11926 - DNA, 16 bp, Homo sapiens
ggttgttactctttaa

SEQ ID NO: 11927 - DNA, 16 bp, Homo sapiens
agttcagaccttggtt

SEQ ID NO: 11928 - DNA, 16 bp, Homo sapiens
ccgcctgatcatggca

SEQ ID NO: 11929 - DNA, 16 bp, Homo sapiens
tttttcatctttgtcc

SEQ ID NO: 11930 - DNA, 16 bp, Homo sapiens
caagaactttcggccc

SEQ ID NO: 11931 - DNA, 16 bp, Homo sapiens
ctagcatgtcattgaa

SEQ ID NO: 11932 - DNA, 14 bp, Homo sapiens
ggaagcttaaggaa

SEQ ID NO: 11933 - DNA, 16 bp, Homo sapiens
agcccactgtttctac

SEQ ID NO: 11934 - DNA, 14 bp, Homo sapiens
gcctcttgctgatg

SEQ ID NO: 11935 - DNA, 18 bp, Homo sapiens
cactgactctgatccaga

SEQ ID NO: 11936 - DNA, 16 bp, Homo sapiens
gtcctcccatttcatg

SEQ ID NO: 11937 - DNA, 16 bp, Homo sapiens
gaatcagggttttggg

SEQ ID NO: 11938 - DNA, 16 bp, Homo sapiens
tgaatcccaagtaagg

SEQ ID NO: 11939 - DNA, 16 bp, Homo sapiens
ttgcactgcaagtcca

SEQ ID NO: 11940 - DNA, 18 bp, Homo sapiens
cttcgtgttcgcggccgt

SEQ ID NO: 11941 - DNA, 16 bp, Homo sapiens
agcagcatggataggc

SEQ ID NO: 11942 - DNA, 20 bp, Homo sapiens
aatcacagatgggtattaaa

SEQ ID NO: 11943 - DNA, 16 bp, Homo sapiens
gagcagtcctacatca

SEQ ID NO: 11944 - DNA, 14 bp, Homo sapiens
tgtgaagatcttga

SEQ ID NO: 11945 - DNA, 16 bp, Homo sapiens
cgcgtctcctgttgcc

SEQ ID NO: 11946 - DNA, 16 bp, Homo sapiens
ggccagacagatgcac

SEQ ID NO: 11947 - DNA, 12 bp, Homo sapiens
catgaaggtgag

SEQ ID NO: 11948 - DNA, 16 bp, Homo sapiens
tctcggccagttcgga

SEQ ID NO: 11949 - DNA, 16 bp, Homo sapiens
agctgtactgatagta

SEQ ID NO: 11950 - DNA, 16 bp, Homo sapiens
tctgctatttcagtcc

SEQ ID NO: 11951 - DNA, 16 bp, Homo sapiens
ggagctctccgggggc

SEQ ID NO: 11952 - DNA, 16 bp, Homo sapiens
cctgaggtgggtgcgg

SEQ ID NO: 11953 - DNA, 16 bp, Homo sapiens
caggggcggtgtcacg

SEQ ID NO: 11954 - DNA, 16 bp, Homo sapiens
cctaccggcacatggc

SEQ ID NO: 11955 - DNA, 15 bp, Homo sapiens
aattgcttgggaaag

SEQ ID NO: 11956 - DNA, 16 bp, Homo sapiens
cggtgtccagcataca

SEQ ID NO: 11957 - DNA, 16 bp, Homo sapiens
gaccagaacccttgac

SEQ ID NO: 11958 - DNA, 16 bp, Homo sapiens
atgagtggatcctgcc

SEQ ID NO: 11959 - DNA, 16 bp, Homo sapiens
ctataagtgcgggcac

SEQ ID NO: 11960 - DNA, 16 bp, Homo sapiens
taaaaaagtgtgccga

SEQ ID NO: 11961 - DNA, 16 bp, Homo sapiens
agccagaccagaattc

SEQ ID NO: 11962 - DNA, 18 bp, Homo sapiens
cttgacctatatttatcc

SEQ ID NO: 11963 - DNA, 20 bp, Homo sapiens
ctacaatactgcacaaactt

SEQ ID NO: 11964 - DNA, 16 bp, Homo sapiens
tctccctaaagttgct

SEQ ID NO: 11965 - DNA, 20 bp, Homo sapiens
agcattattttaggaatata

SEQ ID NO: 11966 - DNA, 16 bp, Homo sapiens
gtgggggcatttggcg

SEQ ID NO: 11967 - DNA, 12 bp, Homo sapiens
tagacttgacct

SEQ ID NO: 11968 - DNA, 20 bp, Homo sapiens
cttcggccacatcaagaaga

SEQ ID NO: 11969 - DNA, 16 bp, Homo sapiens
gcctgggtgccttctg

SEQ ID NO: 11970 - DNA, 16 bp, Homo sapiens
ccttctcggtgtagtt

SEQ ID NO: 11971 - DNA, 16 bp, Homo sapiens
ccgagtttgaagtgtg

SEQ ID NO: 11972 - DNA, 17 bp, Homo sapiens
ataaagtctagaaaatt

SEQ ID NO: 11973 - DNA, 16 bp, Homo sapiens
tgtgttctcttgggcg

SEQ ID NO: 11974 - DNA, 20 bp, Homo sapiens
gcttctctctagtctcacga

SEQ ID NO: 11975 - DNA, 18 bp, Homo sapiens
actatcctgcgggtttta

SEQ ID NO: 11976 - DNA, 18 bp, Homo sapiens
cagcccacccttcaagcc

SEQ ID NO: 11977 - DNA, 16 bp, Homo sapiens
atttgtatgcattcgt

SEQ ID NO: 11978 - DNA, 16 bp, Homo sapiens
aaggacatgtgtctac

SEQ ID NO: 11979 - DNA, 20 bp, Homo sapiens
ttataaaactagtttttaag

SEQ ID NO: 11980 - DNA, 29 bp, Homo sapiens
ggaagttagaagatctgagctctgagtgg

SEQ ID NO: 11981 - DNA, 16 bp, Homo sapiens
gcagacccattttaat

SEQ ID NO: 11982 - DNA, 19 bp, Homo sapiens
attgaagccatccaggaag

SEQ ID NO: 11983 - DNA, 20 bp, Homo sapiens
ttaccacagctgaccagtta

SEQ ID NO: 11984 - DNA, 20 bp, Homo sapiens
tgtgcgtgctgaagggcgac

SEQ ID NO: 11985 - DNA, 16 bp, Homo sapiens
tcaatacagttaggca

SEQ ID NO: 11986 - DNA, 16 bp, Homo sapiens
gactgccgagtcactg

SEQ ID NO: 11987 - DNA, 16 bp, Homo sapiens
aggctctgacctgaac

SEQ ID NO: 11988 - DNA, 16 bp, Homo sapiens
gatcggctctgcccag

SEQ ID NO: 11989 - DNA, 16 bp, Homo sapiens
cgacagggcagtgcgc

SEQ ID NO: 11990 - DNA, 16 bp, Homo sapiens
tactctatgctttggg

SEQ ID NO: 11991 - DNA, 16 bp, Homo sapiens
gatctcgtggtctcag

SEQ ID NO: 11992 - DNA, 16 bp, Homo sapiens
ataactttcctcgtat

SEQ ID NO: 11993 - DNA, 16 bp, Homo sapiens
ccaaggtcttcttggg

SEQ ID NO: 11994 - DNA, 16 bp, Homo sapiens
aagaactttcggcccg

SEQ ID NO: 11995 - DNA, 16 bp, Homo sapiens
gggcggagctcgactt

SEQ ID NO: 11996 - DNA, 16 bp, Homo sapiens
agggtctgcctaagat

SEQ ID NO: 11997 - DNA, 14 bp, Homo sapiens
aattcgaagaaaaa

SEQ ID NO: 11998 - DNA, 16 bp, Homo sapiens
tgagagagtagcttgc

SEQ ID NO: 11999 - DNA, 16 bp, Homo sapiens
agtaacccttacctca

SEQ ID NO: 12000 - DNA, 16 bp, Homo sapiens
cccggccaaaatcttc

SEQ ID NO: 12001 - DNA, 16 bp, Homo sapiens
gatgtctgtgattgca

SEQ ID NO: 12002 - DNA, 16 bp, Homo sapiens
atctccctcctgattc

SEQ ID NO: 12003 - DNA, 18 bp, Homo sapiens
gttcatcaagcagatgcg

SEQ ID NO: 12004 - DNA, 26 bp, Homo sapiens
aactagaaatgccatcttccttgatg

SEQ ID NO: 12005 - DNA, 12 bp, Homo sapiens
tagagggaacaa

SEQ ID NO: 12006 - DNA, 16 bp, Homo sapiens
ggatgaggcggcgacc

SEQ ID NO: 12007 - DNA, 16 bp, Homo sapiens
aggtcgtcaagctgaa

SEQ ID NO: 12008 - DNA, 16 bp, Homo sapiens
tcctagactcatgtaa

SEQ ID NO: 12009 - DNA, 16 bp, Homo sapiens
tcctcatcataatccc

SEQ ID NO: 12010 - DNA, 16 bp, Homo sapiens
tgccagacccatggca

SEQ ID NO: 12011 - DNA, 20 bp, Homo sapiens
ggacacagtgtgtttgattt

SEQ ID NO: 12012 - DNA, 16 bp, Homo sapiens
ctgcttccgggtgcgt

SEQ ID NO: 12013 - DNA, 19 bp, Homo sapiens
ataaaatcacagagggtga

SEQ ID NO: 12014 - DNA, 15 bp, Homo sapiens
tccagaggctagcag

SEQ ID NO: 12015 - DNA, 18 bp, Homo sapiens
acaagatcctgtactcgc

SEQ ID NO: 12016 - DNA, 12 bp, Homo sapiens
actgctccatct

SEQ ID NO: 12017 - DNA, 16 bp, Homo sapiens
gccctcaaggtgttga

SEQ ID NO: 12018 - DNA, 16 bp, Homo sapiens
ccctgagccgtgtgcc

SEQ ID NO: 12019 - DNA, 16 bp, Homo sapiens
tcgacctcccgggtat

SEQ ID NO: 12020 - DNA, 20 bp, Homo sapiens
gccacatcaagaagaagagg

SEQ ID NO: 12021 - DNA, 16 bp, Homo sapiens
attgaaccagatacat

SEQ ID NO: 12022 - DNA, 14 bp, Homo sapiens
aaccctgtttatgc

SEQ ID NO: 12023 - DNA, 16 bp, Homo sapiens
gagaagctcagttcct

SEQ ID NO: 12024 - DNA, 16 bp, Homo sapiens
tacctatactcctcgg

SEQ ID NO: 12025 - DNA, 16 bp, Homo sapiens
tctagcatgttaggag

SEQ ID NO: 12026 - DNA, 18 bp, Homo sapiens
ctggctcacaggaaagtg

SEQ ID NO: 12027 - DNA, 16 bp, Homo sapiens
agccggcccaccatta

SEQ ID NO: 12028 - DNA, 16 bp, Homo sapiens
ccaggccgtttccctt

SEQ ID NO: 12029 - DNA, 16 bp, Homo sapiens
gaggatcccactgcgc

SEQ ID NO: 12030 - DNA, 14 bp, Homo sapiens
agtggaaggagctt

SEQ ID NO: 12031 - DNA, 16 bp, Homo sapiens
ctcgctcagtttgacc

SEQ ID NO: 12032 - DNA, 16 bp, Homo sapiens
gaccatcttcattcga

SEQ ID NO: 12033 - DNA, 20 bp, Homo sapiens
cagacttaaatcacagatgg

SEQ ID NO: 12034 - DNA, 16 bp, Homo sapiens
gaaacacaccctgtcg

SEQ ID NO: 12035 - DNA, 12 bp, Homo sapiens
cagcaacatcgg

SEQ ID NO: 12036 - DNA, 16 bp, Homo sapiens
ggtgttggcccttggt

SEQ ID NO: 12037 - DNA, 16 bp, Homo sapiens
cgcagtgaattacttt

SEQ ID NO: 12038 - DNA, 16 bp, Homo sapiens
caacttcccattagca

SEQ ID NO: 12039 - DNA, 16 bp, Homo sapiens
ggtgaagcattaacct

SEQ ID NO: 12040 - DNA, 20 bp, Homo sapiens
tatggcacttattatgaggc

SEQ ID NO: 12041 - DNA, 16 bp, Homo sapiens
ggaaaccataatcttc

SEQ ID NO: 12042 - DNA, 19 bp, Homo sapiens
cgtctggggtttccgttgc

SEQ ID NO: 12043 - DNA, 15 bp, Homo sapiens
caaatccagaggcta

SEQ ID NO: 12044 - DNA, 16 bp, Homo sapiens
agcctgttgtgtccct

SEQ ID NO: 12045 - DNA, 16 bp, Homo sapiens
ccttgtgaatatagcc

SEQ ID NO: 12046 - DNA, 20 bp, Homo sapiens
actttgtcgctattaacatc

SEQ ID NO: 12047 - DNA, 16 bp, Homo sapiens
ggagcaacggctacag

SEQ ID NO: 12048 - DNA, 16 bp, Homo sapiens
ctggaatgacttgtgg

SEQ ID NO: 12049 - DNA, 16 bp, Homo sapiens
atctagcactctttgc

SEQ ID NO: 12050 - DNA, 16 bp, Homo sapiens
ggggcgtgctctcggg

SEQ ID NO: 12051 - DNA, 16 bp, Homo sapiens
cccgggtcttatatac

SEQ ID NO: 12052 - DNA, 16 bp, Homo sapiens
cgtttaccctggttgc

SEQ ID NO: 12053 - DNA, 16 bp, Homo sapiens
ctctgaacccgtgtgg

SEQ ID NO: 12054 - DNA, 16 bp, Homo sapiens
gctgggaatgattgta

SEQ ID NO: 12055 - DNA, 16 bp, Homo sapiens
ggcgaccgtgaggccg

SEQ ID NO: 12056 - DNA, 16 bp, Homo sapiens
agtcaccaggatattg

SEQ ID NO: 12057 - DNA, 16 bp, Homo sapiens
ataccataatacctaa

SEQ ID NO: 12058 - DNA, 16 bp, Homo sapiens
gcctcatctgtttgtc

SEQ ID NO: 12059 - DNA, 16 bp, Homo sapiens
gagctggcctttcagc

SEQ ID NO: 12060 - DNA, 18 bp, Homo sapiens
gaaaacactaggcgacat

SEQ ID NO: 12061 - DNA, 18 bp, Homo sapiens
ttgacttcatctcagctc

SEQ ID NO: 12062 - DNA, 16 bp, Homo sapiens
aagtggagactttcat

SEQ ID NO: 12063 - DNA, 16 bp, Homo sapiens
ctgatcgacattgagc

SEQ ID NO: 12064 - DNA, 20 bp, Homo sapiens
atggctgagatggaggtttc

SEQ ID NO: 12065 - DNA, 16 bp, Homo sapiens
cggctgccagaggtgc

SEQ ID NO: 12066 - DNA, 20 bp, Homo sapiens
tatgataccaacagtaacca

SEQ ID NO: 12067 - DNA, 16 bp, Homo sapiens
ccgagtcactgtcctg

SEQ ID NO: 12068 - DNA, 16 bp, Homo sapiens
tatggcctatgtgtgg

SEQ ID NO: 12069 - DNA, 16 bp, Homo sapiens
tgggtggtgcccggct

SEQ ID NO: 12070 - DNA, 16 bp, Homo sapiens
gggggggactctacca

SEQ ID NO: 12071 - DNA, 16 bp, Homo sapiens
agaaagcatgctgaaa

SEQ ID NO: 12072 - DNA, 16 bp, Homo sapiens
ggaactcatcattact

SEQ ID NO: 12073 - DNA, 16 bp, Homo sapiens
aagagccgagtttgaa

SEQ ID NO: 12074 - DNA, 17 bp, Homo sapiens
tctcactgggatgaact

SEQ ID NO: 12075 - DNA, 16 bp, Homo sapiens
ccatcccggcctggac

SEQ ID NO: 12076 - DNA, 16 bp, Homo sapiens
tctgagtaacatgtta

SEQ ID NO: 12077 - DNA, 16 bp, Homo sapiens
ccaaaaaacttaaggt

SEQ ID NO: 12078 - DNA, 16 bp, Homo sapiens
cagtgttgaacttgac

SEQ ID NO: 12079 - DNA, 16 bp, Homo sapiens
gcacagagcgcaggcc

SEQ ID NO: 12080 - DNA, 20 bp, Homo sapiens
gattgtgaagttaatgctcc

SEQ ID NO: 12081 - DNA, 16 bp, Homo sapiens
agaaaggtatatcgca

SEQ ID NO: 12082 - DNA, 18 bp, Homo sapiens
ggctggaaacaaggtgat

SEQ ID NO: 12083 - DNA, 16 bp, Homo sapiens
taggcctcgagggggg

SEQ ID NO: 12084 - DNA, 16 bp, Homo sapiens
gccgaccggtgtccag

SEQ ID NO: 12085 - DNA, 16 bp, Homo sapiens
tcagggccaactggac

SEQ ID NO: 12086 - DNA, 16 bp, Homo sapiens
gggggccctcctttgg

SEQ ID NO: 12087 - DNA, 16 bp, Homo sapiens
gagctgatatatacaa

SEQ ID NO: 12088 - DNA, 16 bp, Homo sapiens
cctacggaccatcggt

SEQ ID NO: 12089 - DNA, 16 bp, Homo sapiens
gcaaggcgtggccaga

SEQ ID NO: 12090 - DNA, 16 bp, Homo sapiens
gcctctagtatttatc

SEQ ID NO: 12091 - DNA, 16 bp, Homo sapiens
ggttcttctgctatga

SEQ ID NO: 12092 - DNA, 16 bp, Homo sapiens
agacctgttaggtacc

SEQ ID NO: 12093 - DNA, 16 bp, Homo sapiens
cgtagccagcatttgc

SEQ ID NO: 12094 - DNA, 20 bp, Homo sapiens
caagcaactgtcatatataa

SEQ ID NO: 12095 - DNA, 16 bp, Homo sapiens
tcaaaaacccacaggc

SEQ ID NO: 12096 - DNA, 16 bp, Homo sapiens
cagagaaccctctcca

SEQ ID NO: 12097 - DNA, 16 bp, Homo sapiens
atatggcaaagtaacc

SEQ ID NO: 12098 - DNA, 20 bp, Homo sapiens
tatgacctgcttggtgctga

SEQ ID NO: 12099 - DNA, 16 bp, Homo sapiens
gtaagctcagttccta

SEQ ID NO: 12100 - DNA, 16 bp, Homo sapiens
cattatccgcccagcc

SEQ ID NO: 12101 - DNA, 16 bp, Homo sapiens
gggccaggtcgttgag

SEQ ID NO: 12102 - DNA, 16 bp, Homo sapiens
tgagggtcggcggcgg

SEQ ID NO: 12103 - DNA, 20 bp, Homo sapiens
atggacggggaagacttcca

SEQ ID NO: 12104 - DNA, 20 bp, Homo sapiens
agtgcagggcatcatcaatt

SEQ ID NO: 12105 - DNA, 12 bp, Homo sapiens
gcgaggggcatc

SEQ ID NO: 12106 - DNA, 16 bp, Homo sapiens
gcactgcacaacagct

SEQ ID NO: 12107 - DNA, 16 bp, Homo sapiens
tggtggccgcatagtg

SEQ ID NO: 12108 - DNA, 16 bp, Homo sapiens
tgagggggccctgtga

SEQ ID NO: 12109 - DNA, 16 bp, Homo sapiens
gatcgacattgagcag

SEQ ID NO: 12110 - DNA, 16 bp, Homo sapiens
gcttgctaggtttccc

SEQ ID NO: 12111 - DNA, 16 bp, Homo sapiens
actgcccagattaatc

SEQ ID NO: 12112 - DNA, 16 bp, Homo sapiens
tcatataccgatagga

SEQ ID NO: 12113 - DNA, 16 bp, Homo sapiens
gttaccctgtcttact

SEQ ID NO: 12114 - DNA, 20 bp, Homo sapiens
gtggaaatgaagaaagtaca

SEQ ID NO: 12115 - DNA, 16 bp, Homo sapiens
tggcagcgtgattgct

SEQ ID NO: 12116 - DNA, 16 bp, Homo sapiens
ccttgtgggctccttg

SEQ ID NO: 12117 - DNA, 16 bp, Homo sapiens
gcgtctgcatttggga

SEQ ID NO: 12118 - DNA, 16 bp, Homo sapiens
atcaagtccactaact

SEQ ID NO: 12119 - DNA, 16 bp, Homo sapiens
ccaatcagggggagat

SEQ ID NO: 12120 - DNA, 14 bp, Homo sapiens
atccaaggtggaaa

SEQ ID NO: 12121 - DNA, 20 bp, Homo sapiens
aaaagtgtaattgtgtgact

SEQ ID NO: 12122 - DNA, 18 bp, Homo sapiens
cttaggacctgtgtatga

SEQ ID NO: 12123 - DNA, 16 bp, Homo sapiens
cctggctggacaccgc

SEQ ID NO: 12124 - DNA, 20 bp, Homo sapiens
gaacgtgaacggggagctgc

SEQ ID NO: 12125 - DNA, 14 bp, Homo sapiens
cttgacaagatctg

SEQ ID NO: 12126 - DNA, 16 bp, Homo sapiens
gcaggtcgtcaagctg

SEQ ID NO: 12127 - DNA, 16 bp, Homo sapiens
ggggggcgtgctctcg

SEQ ID NO: 12128 - DNA, 18 bp, Homo sapiens
aagctgaacagtttctca

SEQ ID NO: 12129 - DNA, 16 bp, Homo sapiens
agcaacggctacagac

SEQ ID NO: 12130 - DNA, 16 bp, Homo sapiens
actgccgagtcactgt

SEQ ID NO: 12131 - DNA, 14 bp, Homo sapiens
tagacggatgcgaa

SEQ ID NO: 12132 - DNA, 12 bp, Homo sapiens
tcagtctccggc

SEQ ID NO: 12133 - DNA, 16 bp, Homo sapiens
gcgccgaccggtgtcc

SEQ ID NO: 12134 - DNA, 20 bp, Homo sapiens
ttggagacttgggcaatgtg

SEQ ID NO: 12135 - DNA, 16 bp, Homo sapiens
taagtctgtacccttg

SEQ ID NO: 12136 - DNA, 16 bp, Homo sapiens
cccatctttggtttgc

SEQ ID NO: 12137 - DNA, 16 bp, Homo sapiens
caggagacttgagggt

SEQ ID NO: 12138 - DNA, 16 bp, Homo sapiens
ctgtgtgccaatagac

SEQ ID NO: 12139 - DNA, 15 bp, Homo sapiens
tgagtacacagtcag

SEQ ID NO: 12140 - DNA, 20 bp, Homo sapiens
agcagcagcagctgctccac

SEQ ID NO: 12141 - DNA, 15 bp, Homo sapiens
aatccagaggctagc

SEQ ID NO: 12142 - DNA, 16 bp, Homo sapiens
tgacggaaagggatta

SEQ ID NO: 12143 - DNA, 16 bp, Homo sapiens
cggcgggcgaggagcg

SEQ ID NO: 12144 - DNA, 16 bp, Homo sapiens
agctcttccctattgc

SEQ ID NO: 12145 - DNA, 16 bp, Homo sapiens
ggggccatgctaagag

SEQ ID NO: 12146 - DNA, 16 bp, Homo sapiens
ctttacccacctaatt

SEQ ID NO: 12147 - DNA, 16 bp, Homo sapiens
ggtgtgctcaccggaa

SEQ ID NO: 12148 - protein, 10 aa, Artificial Sequence
  Synthetic
GYTFTNYWMH

SEQ ID NO: 12149 - protein, 17 aa, Artificial Sequence
  Synthetic
EINPINGRSNYGERFKT

SEQ ID NO: 12150 - protein, 7 aa, Artificial Sequence
  Synthetic
GTRAMHY

SEQ ID NO: 12151 - protein, 11 aa, Artificial Sequence
  Synthetic
RTSENIYNNLA

SEQ ID NO: 12152 - protein, 7 aa, Artificial Sequence
  Synthetic
AATNLAD

SEQ ID NO: 12153 - protein, 10 aa, Artificial Sequence
  Synthetic
QHFWGTPLTF

SEQ ID NO: 12154 - protein, 116 aa, Artificial Sequence
  Synthetic
QVQLQQPGAELVKPGASVKLSCKASGYTFTNYWMHWVKQRPGQGLEWIGEINPINGRSNYGERFKTKATLTVDKSSSTAYMQLSSLTSEDSAVYYCARGTRAMHYWGQGTSVTVSS

SEQ ID NO: 12155 - protein, 107 aa, Artificial Sequence
  Synthetic
DIQMTQSPASLSVSVGETVTITCRTSENIYNNLAWYQQKQGKSPQLLVYAATNLADGVPSRFSGSGSGTQYSLKINSLQSEDFGNYYCQHFWGTPLTFGAGTKLELK

SEQ ID NO: 12156 - protein, 9 aa, Artificial Sequence
  Synthetic
YTFTNYWMH

SEQ ID NO: 12157 - protein, 17 aa, Artificial Sequence
  Synthetic
EINPINGRSNYAQKFQG

SEQ ID NO: 12158 - protein, 17 aa, Artificial Sequence
  Synthetic
EINPINGRSNYAEKFQG

SEQ ID NO: 12159 - protein, 17 aa, Artificial Sequence
  Synthetic
EINPIQGRSNYAEKFQG

SEQ ID NO: 12160 - protein, 9 aa, Artificial Sequence
  Synthetic
QHFWGTPLT

SEQ ID NO: 12161 - protein, 7 aa, Artificial Sequence
  Synthetic
AATNLAE

SEQ ID NO: 12162 - protein, 11 aa, Artificial Sequence
  Synthetic
RTSENIYSNLA

SEQ ID NO: 12163 - protein, 7 aa, Artificial Sequence
  Synthetic
AGTNLAD

SEQ ID NO: 12164 - protein, 116 aa, Artificial Sequence
  Synthetic
QVQLVQSGAEVKKPGASVKVSCKASGYTFTNYWMHWVRQAPGQGLEWMGEINPINGRSNYAQKFQGRVTLTVDTSISTAYMELSRLRSDDTAVYYCARGTRAMHYWGQGTLVTVSS

SEQ ID NO: 12165 - protein, 116 aa, Artificial Sequence
  Synthetic
QVQLVQSGAEVKKPGASVKVSCKASGYTFTNYWMHWVRQAPGQGLEWIGEINPINGRSNYAEKFQGRVTLTVDTSSSTAYMELSRLRSDDTAVYYCARGTRAMHYWGQGTLVTVSS

SEQ ID NO: 12166 - protein, 116 aa, Artificial Sequence
  Synthetic
QVQLVQSGAEVKKPGASVKVSCKASGYTFTNYWMHWVRQAPGQGLEWMGEINPIQGRSNYAEKFQGRVTLTVDTSSSTAYMELSSLRSEDTATYYCARGTRAMHYWGQGTLVTVSS

SEQ ID NO: 12167 - protein, 116 aa, Artificial Sequence
  Synthetic
QVQLVQSGAEVKKPGASVKVSCKASGYTFTNYWMHWVRQAPGQGLEWMGEINPINGRSNYAEKFQGRVTLTVDTSSSTAYMELSSLRSEDTATYYCARGTRAMHYWGQGTLVTVSS

SEQ ID NO: 12168 - protein, 107 aa, Artificial Sequence
  Synthetic
DIQMTQSPSSLSASVGDRVTITCRTSENIYNNLAWYQQKPGKSPKLLIYAATNLADGVPSRFSGSGSGTDYTLTISSLQPEDFATYYCQHFWGTPLTFGGGTKVEIK

SEQ ID NO: 12169 - protein, 107 aa, Artificial Sequence
  Synthetic
DIQMTQSPSSLSASVGDRVTITCRTSENIYNNLAWYQQKPGKAPKLLIYAATNLADGVPSRFSGSGSGTDYTLTISSLQPEDFATYYCQHFWGTPLTFGGGTKVEIK

SEQ ID NO: 12170 - protein, 107 aa, Artificial Sequence
  Synthetic
DIQMTQSPSSLSASVGDRVTITCRTSENIYNNLAWYQQKPGKAPKLLIYAATNLAEGVPSRFSGSGSGTDYTLTISSLQPEDFATYYCQHFWGTPLTFGGGTKVEIK

SEQ ID NO: 12171 - protein, 107 aa, Artificial Sequence
  Synthetic
DIQMTQSPSSLSASVGDRVTITCRTSENIYSNLAWYQQKPGKAPKLLIYAGTNLADGVPSRFSGSGSGTDYTLTISSLQPEDFANYYCQHFWGTPLTFGGGTKVEIK

SEQ ID NO: 12172 - DNA, 19 bp, Homo sapiens
tgctgctgctgctgctgct

SEQ ID NO: 12173 - DNA, 19 bp, Homo sapiens
tgctgctgctgctgctgca

SEQ ID NO: 12174 - DNA, 23 bp, Homo sapiens
cagagaggcccaggggacagcca

SEQ ID NO: 12175 - DNA, 23 bp, Homo sapiens
agagaggcccaggggacagccag

SEQ ID NO: 12176 - DNA, 23 bp, Homo sapiens
gagaggcccaggggacagccagg

SEQ ID NO: 12177 - DNA, 23 bp, Homo sapiens
agaggcccaggggacagccaggg

SEQ ID NO: 12178 - DNA, 23 bp, Homo sapiens
gaggcccaggggacagccaggga

SEQ ID NO: 12179 - DNA, 23 bp, Homo sapiens
aggcccaggggacagccagggac

SEQ ID NO: 12180 - DNA, 23 bp, Homo sapiens
ggcccaggggacagccagggaca

SEQ ID NO: 12181 - DNA, 23 bp, Homo sapiens
gcccaggggacagccagggacag

SEQ ID NO: 12182 - DNA, 23 bp, Homo sapiens
cccaggggacagccagggacagg

SEQ ID NO: 12183 - DNA, 23 bp, Homo sapiens
ccaggggacagccagggacaggc

SEQ ID NO: 12184 - DNA, 23 bp, Homo sapiens
caggggacagccagggacaggca

SEQ ID NO: 12185 - DNA, 23 bp, Homo sapiens
aggggacagccagggacaggcag

SEQ ID NO: 12186 - DNA, 23 bp, Homo sapiens
ggggacagccagggacaggcaga

SEQ ID NO: 12187 - DNA, 23 bp, Homo sapiens
gggacagccagggacaggcagac

SEQ ID NO: 12188 - DNA, 23 bp, Homo sapiens
ggacagccagggacaggcagaca

SEQ ID NO: 12189 - DNA, 23 bp, Homo sapiens
gacagccagggacaggcagacat

SEQ ID NO: 12190 - DNA, 23 bp, Homo sapiens
acagccagggacaggcagacatg

SEQ ID NO: 12191 - DNA, 23 bp, Homo sapiens
cagccagggacaggcagacatgc

SEQ ID NO: 12192 - DNA, 23 bp, Homo sapiens
agccagggacaggcagacatgca

SEQ ID NO: 12193 - DNA, 23 bp, Homo sapiens
gccagggacaggcagacatgcag

SEQ ID NO: 12194 - DNA, 23 bp, Homo sapiens
ccagggacaggcagacatgcagc

SEQ ID NO: 12195 - DNA, 23 bp, Homo sapiens
cagggacaggcagacatgcagcc

SEQ ID NO: 12196 - DNA, 23 bp, Homo sapiens
agggacaggcagacatgcagcca

SEQ ID NO: 12197 - DNA, 23 bp, Homo sapiens
gggacaggcagacatgcagccag

SEQ ID NO: 12198 - DNA, 23 bp, Homo sapiens
ggacaggcagacatgcagccagg

SEQ ID NO: 12199 - DNA, 23 bp, Homo sapiens
gacaggcagacatgcagccaggg

SEQ ID NO: 12200 - DNA, 23 bp, Homo sapiens
acaggcagacatgcagccagggc

SEQ ID NO: 12201 - DNA, 23 bp, Homo sapiens
caggcagacatgcagccagggct

SEQ ID NO: 12202 - DNA, 23 bp, Homo sapiens
aggcagacatgcagccagggctc

SEQ ID NO: 12203 - DNA, 23 bp, Homo sapiens
ggcagacatgcagccagggctcc

SEQ ID NO: 12204 - DNA, 23 bp, Homo sapiens
gcagacatgcagccagggctcca

SEQ ID NO: 12205 - DNA, 23 bp, Homo sapiens
cagacatgcagccagggctccag

SEQ ID NO: 12206 - DNA, 23 bp, Homo sapiens
agacatgcagccagggctccagg

SEQ ID NO: 12207 - DNA, 23 bp, Homo sapiens
gacatgcagccagggctccaggg

SEQ ID NO: 12208 - DNA, 23 bp, Homo sapiens
acatgcagccagggctccagggc

SEQ ID NO: 12209 - DNA, 23 bp, Homo sapiens
catgcagccagggctccagggcc

SEQ ID NO: 12210 - DNA, 23 bp, Homo sapiens
atgcagccagggctccagggcct

SEQ ID NO: 12211 - DNA, 23 bp, Homo sapiens
tgcagccagggctccagggcctg

SEQ ID NO: 12212 - DNA, 23 bp, Homo sapiens
gcagccagggctccagggcctgg

SEQ ID NO: 12213 - DNA, 23 bp, Homo sapiens
cagccagggctccagggcctgga

SEQ ID NO: 12214 - DNA, 23 bp, Homo sapiens
agccagggctccagggcctggac

SEQ ID NO: 12215 - DNA, 23 bp, Homo sapiens
gccagggctccagggcctggaca

SEQ ID NO: 12216 - DNA, 23 bp, Homo sapiens
ccagggctccagggcctggacag

SEQ ID NO: 12217 - DNA, 23 bp, Homo sapiens
cagggctccagggcctggacagg

SEQ ID NO: 12218 - DNA, 23 bp, Homo sapiens
agggctccagggcctggacaggg

SEQ ID NO: 12219 - DNA, 23 bp, Homo sapiens
gggctccagggcctggacagggg

SEQ ID NO: 12220 - DNA, 23 bp, Homo sapiens
ggctccagggcctggacaggggc

SEQ ID NO: 12221 - DNA, 23 bp, Homo sapiens
gctccagggcctggacaggggct

SEQ ID NO: 12222 - DNA, 23 bp, Homo sapiens
ctccagggcctggacaggggctg

SEQ ID NO: 12223 - DNA, 23 bp, Homo sapiens
tccagggcctggacaggggctgc

SEQ ID NO: 12224 - DNA, 23 bp, Homo sapiens
ccagggcctggacaggggctgcc

SEQ ID NO: 12225 - DNA, 23 bp, Homo sapiens
cagggcctggacaggggctgcca

SEQ ID NO: 12226 - DNA, 23 bp, Homo sapiens
agggcctggacaggggctgccag

SEQ ID NO: 12227 - DNA, 23 bp, Homo sapiens
gggcctggacaggggctgccagg

SEQ ID NO: 12228 - DNA, 23 bp, Homo sapiens
ggcctggacaggggctgccaggc

SEQ ID NO: 12229 - DNA, 23 bp, Homo sapiens
gcctggacaggggctgccaggcc

SEQ ID NO: 12230 - DNA, 23 bp, Homo sapiens
cctggacaggggctgccaggccc

SEQ ID NO: 12231 - DNA, 23 bp, Homo sapiens
ctggacaggggctgccaggccct

SEQ ID NO: 12232 - DNA, 23 bp, Homo sapiens
tggacaggggctgccaggccctg

SEQ ID NO: 12233 - DNA, 23 bp, Homo sapiens
ggacaggggctgccaggccctgt

SEQ ID NO: 12234 - DNA, 23 bp, Homo sapiens
gacaggggctgccaggccctgtg

SEQ ID NO: 12235 - DNA, 23 bp, Homo sapiens
acaggggctgccaggccctgtga

SEQ ID NO: 12236 - DNA, 23 bp, Homo sapiens
caggggctgccaggccctgtgac

SEQ ID NO: 12237 - DNA, 23 bp, Homo sapiens
aggggctgccaggccctgtgaca

SEQ ID NO: 12238 - DNA, 23 bp, Homo sapiens
ggggctgccaggccctgtgacag

SEQ ID NO: 12239 - DNA, 23 bp, Homo sapiens
gggctgccaggccctgtgacagg

SEQ ID NO: 12240 - DNA, 23 bp, Homo sapiens
ggctgccaggccctgtgacagga

SEQ ID NO: 12241 - DNA, 23 bp, Homo sapiens
gctgccaggccctgtgacaggag

SEQ ID NO: 12242 - DNA, 23 bp, Homo sapiens
ctgccaggccctgtgacaggagg

SEQ ID NO: 12243 - DNA, 23 bp, Homo sapiens
tgccaggccctgtgacaggagga

SEQ ID NO: 12244 - DNA, 23 bp, Homo sapiens
gccaggccctgtgacaggaggac

SEQ ID NO: 12245 - DNA, 23 bp, Homo sapiens
ccaggccctgtgacaggaggacc

SEQ ID NO: 12246 - DNA, 23 bp, Homo sapiens
caggccctgtgacaggaggaccc

SEQ ID NO: 12247 - DNA, 23 bp, Homo sapiens
aggccctgtgacaggaggacccc

SEQ ID NO: 12248 - DNA, 23 bp, Homo sapiens
ggccctgtgacaggaggaccccg

SEQ ID NO: 12249 - DNA, 23 bp, Homo sapiens
gccctgtgacaggaggaccccga

SEQ ID NO: 12250 - DNA, 23 bp, Homo sapiens
ccctgtgacaggaggaccccgag

SEQ ID NO: 12251 - DNA, 23 bp, Homo sapiens
cctgtgacaggaggaccccgagc

SEQ ID NO: 12252 - DNA, 23 bp, Homo sapiens
ctgtgacaggaggaccccgagcc

SEQ ID NO: 12253 - DNA, 23 bp, Homo sapiens
tgtgacaggaggaccccgagccc

SEQ ID NO: 12254 - DNA, 23 bp, Homo sapiens
gtgacaggaggaccccgagcccc

SEQ ID NO: 12255 - DNA, 23 bp, Homo sapiens
tgacaggaggaccccgagccccc

SEQ ID NO: 12256 - DNA, 23 bp, Homo sapiens
gacaggaggaccccgagcccccg

SEQ ID NO: 12257 - DNA, 23 bp, Homo sapiens
acaggaggaccccgagcccccgg

SEQ ID NO: 12258 - DNA, 23 bp, Homo sapiens
caggaggaccccgagcccccggc

SEQ ID NO: 12259 - DNA, 23 bp, Homo sapiens
aggaggaccccgagcccccggcc

SEQ ID NO: 12260 - DNA, 23 bp, Homo sapiens
ggaggaccccgagcccccggccc

SEQ ID NO: 12261 - DNA, 23 bp, Homo sapiens
gaggaccccgagcccccggcccg

SEQ ID NO: 12262 - DNA, 23 bp, Homo sapiens
aggaccccgagcccccggcccgg

SEQ ID NO: 12263 - DNA, 23 bp, Homo sapiens
ggaccccgagcccccggcccggg

SEQ ID NO: 12264 - DNA, 23 bp, Homo sapiens
gaccccgagcccccggcccgggg

SEQ ID NO: 12265 - DNA, 23 bp, Homo sapiens
accccgagcccccggcccgggga

SEQ ID NO: 12266 - DNA, 23 bp, Homo sapiens
ccccgagcccccggcccggggag

SEQ ID NO: 12267 - DNA, 23 bp, Homo sapiens
cccgagcccccggcccggggagg

SEQ ID NO: 12268 - DNA, 23 bp, Homo sapiens
ccgagcccccggcccggggaggg

SEQ ID NO: 12269 - DNA, 23 bp, Homo sapiens
cgagcccccggcccggggagggg

SEQ ID NO: 12270 - DNA, 23 bp, Homo sapiens
gagcccccggcccggggaggggc

SEQ ID NO: 12271 - DNA, 23 bp, Homo sapiens
agcccccggcccggggaggggcc

SEQ ID NO: 12272 - DNA, 23 bp, Homo sapiens
gcccccggcccggggaggggcca

SEQ ID NO: 12273 - DNA, 23 bp, Homo sapiens
cccccggcccggggaggggccat

SEQ ID NO: 12274 - DNA, 23 bp, Homo sapiens
ccccggcccggggaggggccatg

SEQ ID NO: 12275 - DNA, 23 bp, Homo sapiens
cccggcccggggaggggccatgg

SEQ ID NO: 12276 - DNA, 23 bp, Homo sapiens
ccggcccggggaggggccatggt

SEQ ID NO: 12277 - DNA, 23 bp, Homo sapiens
cggcccggggaggggccatggtg

SEQ ID NO: 12278 - DNA, 23 bp, Homo sapiens
ggcccggggaggggccatggtgc

SEQ ID NO: 12279 - DNA, 23 bp, Homo sapiens
gcccggggaggggccatggtgct

SEQ ID NO: 12280 - DNA, 23 bp, Homo sapiens
cccggggaggggccatggtgctg

SEQ ID NO: 12281 - DNA, 23 bp, Homo sapiens
ccggggaggggccatggtgctgc

SEQ ID NO: 12282 - DNA, 23 bp, Homo sapiens
cggggaggggccatggtgctgcc

SEQ ID NO: 12283 - DNA, 23 bp, Homo sapiens
ggggaggggccatggtgctgcct

SEQ ID NO: 12284 - DNA, 23 bp, Homo sapiens
gggaggggccatggtgctgcctg

SEQ ID NO: 12285 - DNA, 23 bp, Homo sapiens
ggaggggccatggtgctgcctgt

SEQ ID NO: 12286 - DNA, 23 bp, Homo sapiens
gaggggccatggtgctgcctgtc

SEQ ID NO: 12287 - DNA, 23 bp, Homo sapiens
aggggccatggtgctgcctgtcc

SEQ ID NO: 12288 - DNA, 23 bp, Homo sapiens
ggggccatggtgctgcctgtcca

SEQ ID NO: 12289 - DNA, 23 bp, Homo sapiens
gggccatggtgctgcctgtccaa

SEQ ID NO: 12290 - DNA, 23 bp, Homo sapiens
ggccatggtgctgcctgtccaac

SEQ ID NO: 12291 - DNA, 23 bp, Homo sapiens
gccatggtgctgcctgtccaaca

SEQ ID NO: 12292 - DNA, 23 bp, Homo sapiens
ccatggtgctgcctgtccaacat

SEQ ID NO: 12293 - DNA, 23 bp, Homo sapiens
catggtgctgcctgtccaacatg

SEQ ID NO: 12294 - DNA, 23 bp, Homo sapiens
atggtgctgcctgtccaacatgt

SEQ ID NO: 12295 - DNA, 23 bp, Homo sapiens
tggtgctgcctgtccaacatgtc

SEQ ID NO: 12296 - DNA, 23 bp, Homo sapiens
ggtgctgcctgtccaacatgtca

SEQ ID NO: 12297 - DNA, 23 bp, Homo sapiens
gtgctgcctgtccaacatgtcag

SEQ ID NO: 12298 - DNA, 23 bp, Homo sapiens
tgctgcctgtccaacatgtcagc

SEQ ID NO: 12299 - DNA, 23 bp, Homo sapiens
gctgcctgtccaacatgtcagcc

SEQ ID NO: 12300 - DNA, 23 bp, Homo sapiens
ctgcctgtccaacatgtcagccg

SEQ ID NO: 12301 - DNA, 23 bp, Homo sapiens
tgcctgtccaacatgtcagccga

SEQ ID NO: 12302 - DNA, 23 bp, Homo sapiens
gcctgtccaacatgtcagccgag

SEQ ID NO: 12303 - DNA, 23 bp, Homo sapiens
cctgtccaacatgtcagccgagg

SEQ ID NO: 12304 - DNA, 23 bp, Homo sapiens
ctgtccaacatgtcagccgaggt

SEQ ID NO: 12305 - DNA, 23 bp, Homo sapiens
tgtccaacatgtcagccgaggtg

SEQ ID NO: 12306 - DNA, 23 bp, Homo sapiens
gtccaacatgtcagccgaggtgc

SEQ ID NO: 12307 - DNA, 23 bp, Homo sapiens
tccaacatgtcagccgaggtgcg

SEQ ID NO: 12308 - DNA, 23 bp, Homo sapiens
ccaacatgtcagccgaggtgcgg

SEQ ID NO: 12309 - DNA, 23 bp, Homo sapiens
caacatgtcagccgaggtgcggc

SEQ ID NO: 12310 - DNA, 23 bp, Homo sapiens
aacatgtcagccgaggtgcggct

SEQ ID NO: 12311 - DNA, 23 bp, Homo sapiens
acatgtcagccgaggtgcggctg

SEQ ID NO: 12312 - DNA, 23 bp, Homo sapiens
catgtcagccgaggtgcggctga

SEQ ID NO: 12313 - DNA, 23 bp, Homo sapiens
atgtcagccgaggtgcggctgag

SEQ ID NO: 12314 - DNA, 23 bp, Homo sapiens
tgtcagccgaggtgcggctgagg

SEQ ID NO: 12315 - DNA, 23 bp, Homo sapiens
gtcagccgaggtgcggctgaggc

SEQ ID NO: 12316 - DNA, 23 bp, Homo sapiens
tcagccgaggtgcggctgaggcg

SEQ ID NO: 12317 - DNA, 23 bp, Homo sapiens
cagccgaggtgcggctgaggcgg

SEQ ID NO: 12318 - DNA, 23 bp, Homo sapiens
agccgaggtgcggctgaggcggc

SEQ ID NO: 12319 - DNA, 23 bp, Homo sapiens
gccgaggtgcggctgaggcggct

SEQ ID NO: 12320 - DNA, 23 bp, Homo sapiens
ccgaggtgcggctgaggcggctc

SEQ ID NO: 12321 - DNA, 23 bp, Homo sapiens
cgaggtgcggctgaggcggctcc

SEQ ID NO: 12322 - DNA, 23 bp, Homo sapiens
gaggtgcggctgaggcggctcca

SEQ ID NO: 12323 - DNA, 23 bp, Homo sapiens
aggtgcggctgaggcggctccag

SEQ ID NO: 12324 - DNA, 23 bp, Homo sapiens
ggtgcggctgaggcggctccagc

SEQ ID NO: 12325 - DNA, 23 bp, Homo sapiens
gtgcggctgaggcggctccagca

SEQ ID NO: 12326 - DNA, 23 bp, Homo sapiens
tgcggctgaggcggctccagcag

SEQ ID NO: 12327 - DNA, 23 bp, Homo sapiens
gcggctgaggcggctccagcagc

SEQ ID NO: 12328 - DNA, 23 bp, Homo sapiens
cggctgaggcggctccagcagct

SEQ ID NO: 12329 - DNA, 23 bp, Homo sapiens
ggctgaggcggctccagcagctg

SEQ ID NO: 12330 - DNA, 23 bp, Homo sapiens
gctgaggcggctccagcagctgg

SEQ ID NO: 12331 - DNA, 23 bp, Homo sapiens
ctgaggcggctccagcagctggt

SEQ ID NO: 12332 - DNA, 23 bp, Homo sapiens
tgaggcggctccagcagctggtg

SEQ ID NO: 12333 - DNA, 23 bp, Homo sapiens
gaggcggctccagcagctggtgt

SEQ ID NO: 12334 - DNA, 23 bp, Homo sapiens
aggcggctccagcagctggtgtt

SEQ ID NO: 12335 - DNA, 23 bp, Homo sapiens
ggcggctccagcagctggtgttg

SEQ ID NO: 12336 - DNA, 23 bp, Homo sapiens
gcggctccagcagctggtgttgg

SEQ ID NO: 12337 - DNA, 23 bp, Homo sapiens
cggctccagcagctggtgttgga

SEQ ID NO: 12338 - DNA, 23 bp, Homo sapiens
ggctccagcagctggtgttggac

SEQ ID NO: 12339 - DNA, 23 bp, Homo sapiens
gctccagcagctggtgttggacc

SEQ ID NO: 12340 - DNA, 23 bp, Homo sapiens
ctccagcagctggtgttggaccc

SEQ ID NO: 12341 - DNA, 23 bp, Homo sapiens
tccagcagctggtgttggacccg

SEQ ID NO: 12342 - DNA, 23 bp, Homo sapiens
ccagcagctggtgttggacccgg

SEQ ID NO: 12343 - DNA, 23 bp, Homo sapiens
cagcagctggtgttggacccggg

SEQ ID NO: 12344 - DNA, 23 bp, Homo sapiens
agcagctggtgttggacccgggc

SEQ ID NO: 12345 - DNA, 23 bp, Homo sapiens
gcagctggtgttggacccgggct

SEQ ID NO: 12346 - DNA, 23 bp, Homo sapiens
cagctggtgttggacccgggctt

SEQ ID NO: 12347 - DNA, 23 bp, Homo sapiens
agctggtgttggacccgggcttc

SEQ ID NO: 12348 - DNA, 23 bp, Homo sapiens
gctggtgttggacccgggcttcc

SEQ ID NO: 12349 - DNA, 23 bp, Homo sapiens
ctggtgttggacccgggcttcct

SEQ ID NO: 12350 - DNA, 23 bp, Homo sapiens
tggtgttggacccgggcttcctg

SEQ ID NO: 12351 - DNA, 23 bp, Homo sapiens
ggtgttggacccgggcttcctgg

SEQ ID NO: 12352 - DNA, 23 bp, Homo sapiens
gtgttggacccgggcttcctggg

SEQ ID NO: 12353 - DNA, 23 bp, Homo sapiens
tgttggacccgggcttcctgggg

SEQ ID NO: 12354 - DNA, 23 bp, Homo sapiens
gttggacccgggcttcctggggc

SEQ ID NO: 12355 - DNA, 23 bp, Homo sapiens
ttggacccgggcttcctggggct

SEQ ID NO: 12356 - DNA, 23 bp, Homo sapiens
tggacccgggcttcctggggctg

SEQ ID NO: 12357 - DNA, 23 bp, Homo sapiens
ggacccgggcttcctggggctgg

SEQ ID NO: 12358 - DNA, 23 bp, Homo sapiens
gacccgggcttcctggggctgga

SEQ ID NO: 12359 - DNA, 23 bp, Homo sapiens
acccgggcttcctggggctggag

SEQ ID NO: 12360 - DNA, 23 bp, Homo sapiens
cccgggcttcctggggctggagc

SEQ ID NO: 12361 - DNA, 23 bp, Homo sapiens
ccgggcttcctggggctggagcc

SEQ ID NO: 12362 - DNA, 23 bp, Homo sapiens
cgggcttcctggggctggagccc

SEQ ID NO: 12363 - DNA, 23 bp, Homo sapiens
gggcttcctggggctggagcccc

SEQ ID NO: 12364 - DNA, 23 bp, Homo sapiens
ggcttcctggggctggagcccct

SEQ ID NO: 12365 - DNA, 23 bp, Homo sapiens
gcttcctggggctggagcccctg

SEQ ID NO: 12366 - DNA, 23 bp, Homo sapiens
cttcctggggctggagcccctgc

SEQ ID NO: 12367 - DNA, 23 bp, Homo sapiens
ttcctggggctggagcccctgct

SEQ ID NO: 12368 - DNA, 23 bp, Homo sapiens
tcctggggctggagcccctgctc

SEQ ID NO: 12369 - DNA, 23 bp, Homo sapiens
cctggggctggagcccctgctcg

SEQ ID NO: 12370 - DNA, 23 bp, Homo sapiens
ctggggctggagcccctgctcga

SEQ ID NO: 12371 - DNA, 23 bp, Homo sapiens
tggggctggagcccctgctcgac

SEQ ID NO: 12372 - DNA, 23 bp, Homo sapiens
ggggctggagcccctgctcgacc

SEQ ID NO: 12373 - DNA, 23 bp, Homo sapiens
gggctggagcccctgctcgacct

SEQ ID NO: 12374 - DNA, 23 bp, Homo sapiens
ggctggagcccctgctcgacctt

SEQ ID NO: 12375 - DNA, 23 bp, Homo sapiens
gctggagcccctgctcgaccttc

SEQ ID NO: 12376 - DNA, 23 bp, Homo sapiens
ctggagcccctgctcgaccttct

SEQ ID NO: 12377 - DNA, 23 bp, Homo sapiens
tggagcccctgctcgaccttctc

SEQ ID NO: 12378 - DNA, 23 bp, Homo sapiens
ggagcccctgctcgaccttctcc

SEQ ID NO: 12379 - DNA, 23 bp, Homo sapiens
gagcccctgctcgaccttctcct

SEQ ID NO: 12380 - DNA, 23 bp, Homo sapiens
agcccctgctcgaccttctcctg

SEQ ID NO: 12381 - DNA, 23 bp, Homo sapiens
gcccctgctcgaccttctcctgg

SEQ ID NO: 12382 - DNA, 23 bp, Homo sapiens
cccctgctcgaccttctcctggg

SEQ ID NO: 12383 - DNA, 23 bp, Homo sapiens
ccctgctcgaccttctcctgggc

SEQ ID NO: 12384 - DNA, 23 bp, Homo sapiens
cctgctcgaccttctcctgggcg

SEQ ID NO: 12385 - DNA, 23 bp, Homo sapiens
ctgctcgaccttctcctgggcgt

SEQ ID NO: 12386 - DNA, 23 bp, Homo sapiens
tgctcgaccttctcctgggcgtc

SEQ ID NO: 12387 - DNA, 23 bp, Homo sapiens
gctcgaccttctcctgggcgtcc

SEQ ID NO: 12388 - DNA, 23 bp, Homo sapiens
ctcgaccttctcctgggcgtcca

SEQ ID NO: 12389 - DNA, 23 bp, Homo sapiens
tcgaccttctcctgggcgtccac

SEQ ID NO: 12390 - DNA, 23 bp, Homo sapiens
cgaccttctcctgggcgtccacc

SEQ ID NO: 12391 - DNA, 23 bp, Homo sapiens
gaccttctcctgggcgtccacca

SEQ ID NO: 12392 - DNA, 23 bp, Homo sapiens
accttctcctgggcgtccaccag

SEQ ID NO: 12393 - DNA, 23 bp, Homo sapiens
ccttctcctgggcgtccaccagg

SEQ ID NO: 12394 - DNA, 23 bp, Homo sapiens
cttctcctgggcgtccaccagga

SEQ ID NO: 12395 - DNA, 23 bp, Homo sapiens
ttctcctgggcgtccaccaggag

SEQ ID NO: 12396 - DNA, 23 bp, Homo sapiens
tctcctgggcgtccaccaggagc

SEQ ID NO: 12397 - DNA, 23 bp, Homo sapiens
ctcctgggcgtccaccaggagct

SEQ ID NO: 12398 - DNA, 23 bp, Homo sapiens
tcctgggcgtccaccaggagctg

SEQ ID NO: 12399 - DNA, 23 bp, Homo sapiens
cctgggcgtccaccaggagctgg

SEQ ID NO: 12400 - DNA, 23 bp, Homo sapiens
ctgggcgtccaccaggagctggg

SEQ ID NO: 12401 - DNA, 23 bp, Homo sapiens
tgggcgtccaccaggagctgggc

SEQ ID NO: 12402 - DNA, 23 bp, Homo sapiens
gggcgtccaccaggagctgggcg

SEQ ID NO: 12403 - DNA, 23 bp, Homo sapiens
ggcgtccaccaggagctgggcgc

SEQ ID NO: 12404 - DNA, 23 bp, Homo sapiens
gcgtccaccaggagctgggcgcc

SEQ ID NO: 12405 - DNA, 23 bp, Homo sapiens
cgtccaccaggagctgggcgcct

SEQ ID NO: 12406 - DNA, 23 bp, Homo sapiens
gtccaccaggagctgggcgcctc

SEQ ID NO: 12407 - DNA, 23 bp, Homo sapiens
tccaccaggagctgggcgcctcc

SEQ ID NO: 12408 - DNA, 23 bp, Homo sapiens
ccaccaggagctgggcgcctccg

SEQ ID NO: 12409 - DNA, 23 bp, Homo sapiens
caccaggagctgggcgcctccga

SEQ ID NO: 12410 - DNA, 23 bp, Homo sapiens
accaggagctgggcgcctccgaa

SEQ ID NO: 12411 - DNA, 23 bp, Homo sapiens
ccaggagctgggcgcctccgaac

SEQ ID NO: 12412 - DNA, 23 bp, Homo sapiens
caggagctgggcgcctccgaact

SEQ ID NO: 12413 - DNA, 23 bp, Homo sapiens
aggagctgggcgcctccgaactg

SEQ ID NO: 12414 - DNA, 23 bp, Homo sapiens
ggagctgggcgcctccgaactgg

SEQ ID NO: 12415 - DNA, 23 bp, Homo sapiens
gagctgggcgcctccgaactggc

SEQ ID NO: 12416 - DNA, 23 bp, Homo sapiens
agctgggcgcctccgaactggcc

SEQ ID NO: 12417 - DNA, 23 bp, Homo sapiens
gctgggcgcctccgaactggccc

SEQ ID NO: 12418 - DNA, 23 bp, Homo sapiens
ctgggcgcctccgaactggccca

SEQ ID NO: 12419 - DNA, 23 bp, Homo sapiens
tgggcgcctccgaactggcccag

SEQ ID NO: 12420 - DNA, 23 bp, Homo sapiens
gggcgcctccgaactggcccagg

SEQ ID NO: 12421 - DNA, 23 bp, Homo sapiens
ggcgcctccgaactggcccagga

SEQ ID NO: 12422 - DNA, 23 bp, Homo sapiens
gcgcctccgaactggcccaggac

SEQ ID NO: 12423 - DNA, 23 bp, Homo sapiens
cgcctccgaactggcccaggaca

SEQ ID NO: 12424 - DNA, 23 bp, Homo sapiens
gcctccgaactggcccaggacaa

SEQ ID NO: 12425 - DNA, 23 bp, Homo sapiens
cctccgaactggcccaggacaag

SEQ ID NO: 12426 - DNA, 23 bp, Homo sapiens
ctccgaactggcccaggacaagt

SEQ ID NO: 12427 - DNA, 23 bp, Homo sapiens
tccgaactggcccaggacaagta

SEQ ID NO: 12428 - DNA, 23 bp, Homo sapiens
ccgaactggcccaggacaagtac

SEQ ID NO: 12429 - DNA, 23 bp, Homo sapiens
cgaactggcccaggacaagtacg

SEQ ID NO: 12430 - DNA, 23 bp, Homo sapiens
gaactggcccaggacaagtacgt

SEQ ID NO: 12431 - DNA, 23 bp, Homo sapiens
aactggcccaggacaagtacgtg

SEQ ID NO: 12432 - DNA, 23 bp, Homo sapiens
actggcccaggacaagtacgtgg

SEQ ID NO: 12433 - DNA, 23 bp, Homo sapiens
ctggcccaggacaagtacgtggc

SEQ ID NO: 12434 - DNA, 23 bp, Homo sapiens
tggcccaggacaagtacgtggcc

SEQ ID NO: 12435 - DNA, 23 bp, Homo sapiens
ggcccaggacaagtacgtggccg

SEQ ID NO: 12436 - DNA, 23 bp, Homo sapiens
gcccaggacaagtacgtggccga

SEQ ID NO: 12437 - DNA, 23 bp, Homo sapiens
cccaggacaagtacgtggccgac

SEQ ID NO: 12438 - DNA, 23 bp, Homo sapiens
ccaggacaagtacgtggccgact

SEQ ID NO: 12439 - DNA, 23 bp, Homo sapiens
caggacaagtacgtggccgactt

SEQ ID NO: 12440 - DNA, 23 bp, Homo sapiens
aggacaagtacgtggccgacttc

SEQ ID NO: 12441 - DNA, 23 bp, Homo sapiens
ggacaagtacgtggccgacttct

SEQ ID NO: 12442 - DNA, 23 bp, Homo sapiens
gacaagtacgtggccgacttctt

SEQ ID NO: 12443 - DNA, 23 bp, Homo sapiens
acaagtacgtggccgacttcttg

SEQ ID NO: 12444 - DNA, 23 bp, Homo sapiens
caagtacgtggccgacttcttgc

SEQ ID NO: 12445 - DNA, 23 bp, Homo sapiens
aagtacgtggccgacttcttgca

SEQ ID NO: 12446 - DNA, 23 bp, Homo sapiens
agtacgtggccgacttcttgcag

SEQ ID NO: 12447 - DNA, 23 bp, Homo sapiens
gtacgtggccgacttcttgcagt

SEQ ID NO: 12448 - DNA, 23 bp, Homo sapiens
tacgtggccgacttcttgcagtg

SEQ ID NO: 12449 - DNA, 23 bp, Homo sapiens
acgtggccgacttcttgcagtgg

SEQ ID NO: 12450 - DNA, 23 bp, Homo sapiens
cgtggccgacttcttgcagtggg

SEQ ID NO: 12451 - DNA, 23 bp, Homo sapiens
gtggccgacttcttgcagtgggc

SEQ ID NO: 12452 - DNA, 23 bp, Homo sapiens
tggccgacttcttgcagtgggcg

SEQ ID NO: 12453 - DNA, 23 bp, Homo sapiens
ggccgacttcttgcagtgggcgg

SEQ ID NO: 12454 - DNA, 23 bp, Homo sapiens
gccgacttcttgcagtgggcgga

SEQ ID NO: 12455 - DNA, 23 bp, Homo sapiens
ccgacttcttgcagtgggcggag

SEQ ID NO: 12456 - DNA, 23 bp, Homo sapiens
cgacttcttgcagtgggcggagc

SEQ ID NO: 12457 - DNA, 23 bp, Homo sapiens
gacttcttgcagtgggcggagcc

SEQ ID NO: 12458 - DNA, 23 bp, Homo sapiens
acttcttgcagtgggcggagccc

SEQ ID NO: 12459 - DNA, 23 bp, Homo sapiens
cttcttgcagtgggcggagccca

SEQ ID NO: 12460 - DNA, 23 bp, Homo sapiens
ttcttgcagtgggcggagcccat

SEQ ID NO: 12461 - DNA, 23 bp, Homo sapiens
tcttgcagtgggcggagcccatc

SEQ ID NO: 12462 - DNA, 23 bp, Homo sapiens
cttgcagtgggcggagcccatcg

SEQ ID NO: 12463 - DNA, 23 bp, Homo sapiens
ttgcagtgggcggagcccatcgt

SEQ ID NO: 12464 - DNA, 23 bp, Homo sapiens
tgcagtgggcggagcccatcgtg

SEQ ID NO: 12465 - DNA, 23 bp, Homo sapiens
gcagtgggcggagcccatcgtgg

SEQ ID NO: 12466 - DNA, 23 bp, Homo sapiens
cagtgggcggagcccatcgtggt

SEQ ID NO: 12467 - DNA, 23 bp, Homo sapiens
agtgggcggagcccatcgtggtg

SEQ ID NO: 12468 - DNA, 23 bp, Homo sapiens
gtgggcggagcccatcgtggtga

SEQ ID NO: 12469 - DNA, 23 bp, Homo sapiens
tgggcggagcccatcgtggtgag

SEQ ID NO: 12470 - DNA, 23 bp, Homo sapiens
gggcggagcccatcgtggtgagg

SEQ ID NO: 12471 - DNA, 23 bp, Homo sapiens
ggcggagcccatcgtggtgaggc

SEQ ID NO: 12472 - DNA, 23 bp, Homo sapiens
gcggagcccatcgtggtgaggct

SEQ ID NO: 12473 - DNA, 23 bp, Homo sapiens
cggagcccatcgtggtgaggctt

SEQ ID NO: 12474 - DNA, 23 bp, Homo sapiens
ggagcccatcgtggtgaggctta

SEQ ID NO: 12475 - DNA, 23 bp, Homo sapiens
gagcccatcgtggtgaggcttaa

SEQ ID NO: 12476 - DNA, 23 bp, Homo sapiens
agcccatcgtggtgaggcttaag

SEQ ID NO: 12477 - DNA, 23 bp, Homo sapiens
gcccatcgtggtgaggcttaagg

SEQ ID NO: 12478 - DNA, 23 bp, Homo sapiens
cccatcgtggtgaggcttaagga

SEQ ID NO: 12479 - DNA, 23 bp, Homo sapiens
ccatcgtggtgaggcttaaggag

SEQ ID NO: 12480 - DNA, 23 bp, Homo sapiens
catcgtggtgaggcttaaggagg

SEQ ID NO: 12481 - DNA, 23 bp, Homo sapiens
atcgtggtgaggcttaaggaggt

SEQ ID NO: 12482 - DNA, 23 bp, Homo sapiens
tcgtggtgaggcttaaggaggtc

SEQ ID NO: 12483 - DNA, 23 bp, Homo sapiens
cgtggtgaggcttaaggaggtcc

SEQ ID NO: 12484 - DNA, 23 bp, Homo sapiens
gtggtgaggcttaaggaggtccg

SEQ ID NO: 12485 - DNA, 23 bp, Homo sapiens
tggtgaggcttaaggaggtccga

SEQ ID NO: 12486 - DNA, 23 bp, Homo sapiens
ggtgaggcttaaggaggtccgac

SEQ ID NO: 12487 - DNA, 23 bp, Homo sapiens
gtgaggcttaaggaggtccgact

SEQ ID NO: 12488 - DNA, 23 bp, Homo sapiens
tgaggcttaaggaggtccgactg

SEQ ID NO: 12489 - DNA, 23 bp, Homo sapiens
gaggcttaaggaggtccgactgc

SEQ ID NO: 12490 - DNA, 23 bp, Homo sapiens
aggcttaaggaggtccgactgca

SEQ ID NO: 12491 - DNA, 23 bp, Homo sapiens
ggcttaaggaggtccgactgcag

SEQ ID NO: 12492 - DNA, 23 bp, Homo sapiens
gcttaaggaggtccgactgcaga

SEQ ID NO: 12493 - DNA, 23 bp, Homo sapiens
cttaaggaggtccgactgcagag

SEQ ID NO: 12494 - DNA, 23 bp, Homo sapiens
ttaaggaggtccgactgcagagg

SEQ ID NO: 12495 - DNA, 23 bp, Homo sapiens
taaggaggtccgactgcagaggg

SEQ ID NO: 12496 - DNA, 23 bp, Homo sapiens
aaggaggtccgactgcagaggga

SEQ ID NO: 12497 - DNA, 23 bp, Homo sapiens
aggaggtccgactgcagagggac

SEQ ID NO: 12498 - DNA, 23 bp, Homo sapiens
ggaggtccgactgcagagggacg

SEQ ID NO: 12499 - DNA, 23 bp, Homo sapiens
gaggtccgactgcagagggacga

SEQ ID NO: 12500 - DNA, 23 bp, Homo sapiens
aggtccgactgcagagggacgac

SEQ ID NO: 12501 - DNA, 23 bp, Homo sapiens
ggtccgactgcagagggacgact

SEQ ID NO: 12502 - DNA, 23 bp, Homo sapiens
gtccgactgcagagggacgactt

SEQ ID NO: 12503 - DNA, 23 bp, Homo sapiens
tccgactgcagagggacgacttc

SEQ ID NO: 12504 - DNA, 23 bp, Homo sapiens
ccgactgcagagggacgacttcg

SEQ ID NO: 12505 - DNA, 23 bp, Homo sapiens
cgactgcagagggacgacttcga

SEQ ID NO: 12506 - DNA, 23 bp, Homo sapiens
gactgcagagggacgacttcgag

SEQ ID NO: 12507 - DNA, 23 bp, Homo sapiens
actgcagagggacgacttcgaga

SEQ ID NO: 12508 - DNA, 23 bp, Homo sapiens
ctgcagagggacgacttcgagat

SEQ ID NO: 12509 - DNA, 23 bp, Homo sapiens
tgcagagggacgacttcgagatt

SEQ ID NO: 12510 - DNA, 23 bp, Homo sapiens
gcagagggacgacttcgagattc

SEQ ID NO: 12511 - DNA, 23 bp, Homo sapiens
cagagggacgacttcgagattct

SEQ ID NO: 12512 - DNA, 23 bp, Homo sapiens
agagggacgacttcgagattctg

SEQ ID NO: 12513 - DNA, 23 bp, Homo sapiens
gagggacgacttcgagattctga

SEQ ID NO: 12514 - DNA, 23 bp, Homo sapiens
agggacgacttcgagattctgaa

SEQ ID NO: 12515 - DNA, 23 bp, Homo sapiens
gggacgacttcgagattctgaag

SEQ ID NO: 12516 - DNA, 23 bp, Homo sapiens
ggacgacttcgagattctgaagg

SEQ ID NO: 12517 - DNA, 23 bp, Homo sapiens
gacgacttcgagattctgaaggt

SEQ ID NO: 12518 - DNA, 23 bp, Homo sapiens
acgacttcgagattctgaaggtg

SEQ ID NO: 12519 - DNA, 23 bp, Homo sapiens
cgacttcgagattctgaaggtga

SEQ ID NO: 12520 - DNA, 23 bp, Homo sapiens
gacttcgagattctgaaggtgat

SEQ ID NO: 12521 - DNA, 23 bp, Homo sapiens
acttcgagattctgaaggtgatc

SEQ ID NO: 12522 - DNA, 23 bp, Homo sapiens
cttcgagattctgaaggtgatcg

SEQ ID NO: 12523 - DNA, 23 bp, Homo sapiens
ttcgagattctgaaggtgatcgg

SEQ ID NO: 12524 - DNA, 23 bp, Homo sapiens
tcgagattctgaaggtgatcgga

SEQ ID NO: 12525 - DNA, 23 bp, Homo sapiens
cgagattctgaaggtgatcggac

SEQ ID NO: 12526 - DNA, 23 bp, Homo sapiens
gagattctgaaggtgatcggacg

SEQ ID NO: 12527 - DNA, 23 bp, Homo sapiens
agattctgaaggtgatcggacgc

SEQ ID NO: 12528 - DNA, 23 bp, Homo sapiens
gattctgaaggtgatcggacgcg

SEQ ID NO: 12529 - DNA, 23 bp, Homo sapiens
attctgaaggtgatcggacgcgg

SEQ ID NO: 12530 - DNA, 23 bp, Homo sapiens
ttctgaaggtgatcggacgcggg

SEQ ID NO: 12531 - DNA, 23 bp, Homo sapiens
tctgaaggtgatcggacgcgggg

SEQ ID NO: 12532 - DNA, 23 bp, Homo sapiens
ctgaaggtgatcggacgcggggc

SEQ ID NO: 12533 - DNA, 23 bp, Homo sapiens
tgaaggtgatcggacgcggggcg

SEQ ID NO: 12534 - DNA, 23 bp, Homo sapiens
gaaggtgatcggacgcggggcgt

SEQ ID NO: 12535 - DNA, 23 bp, Homo sapiens
aaggtgatcggacgcggggcgtt

SEQ ID NO: 12536 - DNA, 23 bp, Homo sapiens
aggtgatcggacgcggggcgttc

SEQ ID NO: 12537 - DNA, 23 bp, Homo sapiens
ggtgatcggacgcggggcgttca

SEQ ID NO: 12538 - DNA, 23 bp, Homo sapiens
gtgatcggacgcggggcgttcag

SEQ ID NO: 12539 - DNA, 23 bp, Homo sapiens
tgatcggacgcggggcgttcagc

SEQ ID NO: 12540 - DNA, 23 bp, Homo sapiens
gatcggacgcggggcgttcagcg

SEQ ID NO: 12541 - DNA, 23 bp, Homo sapiens
atcggacgcggggcgttcagcga

SEQ ID NO: 12542 - DNA, 23 bp, Homo sapiens
tcggacgcggggcgttcagcgag

SEQ ID NO: 12543 - DNA, 23 bp, Homo sapiens
cggacgcggggcgttcagcgagg

SEQ ID NO: 12544 - DNA, 23 bp, Homo sapiens
ggacgcggggcgttcagcgaggt

SEQ ID NO: 12545 - DNA, 23 bp, Homo sapiens
gacgcggggcgttcagcgaggta

SEQ ID NO: 12546 - DNA, 23 bp, Homo sapiens
acgcggggcgttcagcgaggtag

SEQ ID NO: 12547 - DNA, 23 bp, Homo sapiens
cgcggggcgttcagcgaggtagc

SEQ ID NO: 12548 - DNA, 23 bp, Homo sapiens
gcggggcgttcagcgaggtagcg

SEQ ID NO: 12549 - DNA, 23 bp, Homo sapiens
cggggcgttcagcgaggtagcgg

SEQ ID NO: 12550 - DNA, 23 bp, Homo sapiens
ggggcgttcagcgaggtagcggt

SEQ ID NO: 12551 - DNA, 23 bp, Homo sapiens
gggcgttcagcgaggtagcggta

SEQ ID NO: 12552 - DNA, 23 bp, Homo sapiens
ggcgttcagcgaggtagcggtag

SEQ ID NO: 12553 - DNA, 23 bp, Homo sapiens
gcgttcagcgaggtagcggtagt

SEQ ID NO: 12554 - DNA, 23 bp, Homo sapiens
cgttcagcgaggtagcggtagtg

SEQ ID NO: 12555 - DNA, 23 bp, Homo sapiens
gttcagcgaggtagcggtagtga

SEQ ID NO: 12556 - DNA, 23 bp, Homo sapiens
ttcagcgaggtagcggtagtgaa

SEQ ID NO: 12557 - DNA, 23 bp, Homo sapiens
tcagcgaggtagcggtagtgaag

SEQ ID NO: 12558 - DNA, 23 bp, Homo sapiens
cagcgaggtagcggtagtgaaga

SEQ ID NO: 12559 - DNA, 23 bp, Homo sapiens
agcgaggtagcggtagtgaagat

SEQ ID NO: 12560 - DNA, 23 bp, Homo sapiens
gcgaggtagcggtagtgaagatg

SEQ ID NO: 12561 - DNA, 23 bp, Homo sapiens
cgaggtagcggtagtgaagatga

SEQ ID NO: 12562 - DNA, 23 bp, Homo sapiens
gaggtagcggtagtgaagatgaa

SEQ ID NO: 12563 - DNA, 23 bp, Homo sapiens
aggtagcggtagtgaagatgaag

SEQ ID NO: 12564 - DNA, 23 bp, Homo sapiens
ggtagcggtagtgaagatgaagc

SEQ ID NO: 12565 - DNA, 23 bp, Homo sapiens
gtagcggtagtgaagatgaagca

SEQ ID NO: 12566 - DNA, 23 bp, Homo sapiens
tagcggtagtgaagatgaagcag

SEQ ID NO: 12567 - DNA, 23 bp, Homo sapiens
agcggtagtgaagatgaagcaga

SEQ ID NO: 12568 - DNA, 23 bp, Homo sapiens
gcggtagtgaagatgaagcagac

SEQ ID NO: 12569 - DNA, 23 bp, Homo sapiens
cggtagtgaagatgaagcagacg

SEQ ID NO: 12570 - DNA, 23 bp, Homo sapiens
ggtagtgaagatgaagcagacgg

SEQ ID NO: 12571 - DNA, 23 bp, Homo sapiens
gtagtgaagatgaagcagacggg

SEQ ID NO: 12572 - DNA, 23 bp, Homo sapiens
tagtgaagatgaagcagacgggc

SEQ ID NO: 12573 - DNA, 23 bp, Homo sapiens
agtgaagatgaagcagacgggcc

SEQ ID NO: 12574 - DNA, 23 bp, Homo sapiens
gtgaagatgaagcagacgggcca

SEQ ID NO: 12575 - DNA, 23 bp, Homo sapiens
tgaagatgaagcagacgggccag

SEQ ID NO: 12576 - DNA, 23 bp, Homo sapiens
gaagatgaagcagacgggccagg

SEQ ID NO: 12577 - DNA, 23 bp, Homo sapiens
aagatgaagcagacgggccaggt

SEQ ID NO: 12578 - DNA, 23 bp, Homo sapiens
agatgaagcagacgggccaggtg

SEQ ID NO: 12579 - DNA, 23 bp, Homo sapiens
gatgaagcagacgggccaggtgt

SEQ ID NO: 12580 - DNA, 23 bp, Homo sapiens
atgaagcagacgggccaggtgta

SEQ ID NO: 12581 - DNA, 23 bp, Homo sapiens
tgaagcagacgggccaggtgtat

SEQ ID NO: 12582 - DNA, 23 bp, Homo sapiens
gaagcagacgggccaggtgtatg

SEQ ID NO: 12583 - DNA, 23 bp, Homo sapiens
aagcagacgggccaggtgtatgc

SEQ ID NO: 12584 - DNA, 23 bp, Homo sapiens
agcagacgggccaggtgtatgcc

SEQ ID NO: 12585 - DNA, 23 bp, Homo sapiens
gcagacgggccaggtgtatgcca

SEQ ID NO: 12586 - DNA, 23 bp, Homo sapiens
cagacgggccaggtgtatgccat

SEQ ID NO: 12587 - DNA, 23 bp, Homo sapiens
agacgggccaggtgtatgccatg

SEQ ID NO: 12588 - DNA, 23 bp, Homo sapiens
gacgggccaggtgtatgccatga

SEQ ID NO: 12589 - DNA, 23 bp, Homo sapiens
acgggccaggtgtatgccatgaa

SEQ ID NO: 12590 - DNA, 23 bp, Homo sapiens
cgggccaggtgtatgccatgaag

SEQ ID NO: 12591 - DNA, 23 bp, Homo sapiens
gggccaggtgtatgccatgaaga

SEQ ID NO: 12592 - DNA, 23 bp, Homo sapiens
ggccaggtgtatgccatgaagat

SEQ ID NO: 12593 - DNA, 23 bp, Homo sapiens
gccaggtgtatgccatgaagatc

SEQ ID NO: 12594 - DNA, 23 bp, Homo sapiens
ccaggtgtatgccatgaagatca

SEQ ID NO: 12595 - DNA, 23 bp, Homo sapiens
caggtgtatgccatgaagatcat

SEQ ID NO: 12596 - DNA, 23 bp, Homo sapiens
aggtgtatgccatgaagatcatg

SEQ ID NO: 12597 - DNA, 23 bp, Homo sapiens
ggtgtatgccatgaagatcatga

SEQ ID NO: 12598 - DNA, 23 bp, Homo sapiens
gtgtatgccatgaagatcatgaa

SEQ ID NO: 12599 - DNA, 23 bp, Homo sapiens
tgtatgccatgaagatcatgaac

SEQ ID NO: 12600 - DNA, 23 bp, Homo sapiens
gtatgccatgaagatcatgaaca

SEQ ID NO: 12601 - DNA, 23 bp, Homo sapiens
tatgccatgaagatcatgaacaa

SEQ ID NO: 12602 - DNA, 23 bp, Homo sapiens
atgccatgaagatcatgaacaag

SEQ ID NO: 12603 - DNA, 23 bp, Homo sapiens
tgccatgaagatcatgaacaagt

SEQ ID NO: 12604 - DNA, 23 bp, Homo sapiens
gccatgaagatcatgaacaagtg

SEQ ID NO: 12605 - DNA, 23 bp, Homo sapiens
ccatgaagatcatgaacaagtgg

SEQ ID NO: 12606 - DNA, 23 bp, Homo sapiens
catgaagatcatgaacaagtggg

SEQ ID NO: 12607 - DNA, 23 bp, Homo sapiens
atgaagatcatgaacaagtggga

SEQ ID NO: 12608 - DNA, 23 bp, Homo sapiens
tgaagatcatgaacaagtgggac

SEQ ID NO: 12609 - DNA, 23 bp, Homo sapiens
gaagatcatgaacaagtgggaca

SEQ ID NO: 12610 - DNA, 23 bp, Homo sapiens
aagatcatgaacaagtgggacat

SEQ ID NO: 12611 - DNA, 23 bp, Homo sapiens
agatcatgaacaagtgggacatg

SEQ ID NO: 12612 - DNA, 23 bp, Homo sapiens
gatcatgaacaagtgggacatgc

SEQ ID NO: 12613 - DNA, 23 bp, Homo sapiens
atcatgaacaagtgggacatgct

SEQ ID NO: 12614 - DNA, 23 bp, Homo sapiens
tcatgaacaagtgggacatgctg

SEQ ID NO: 12615 - DNA, 23 bp, Homo sapiens
catgaacaagtgggacatgctga

SEQ ID NO: 12616 - DNA, 23 bp, Homo sapiens
atgaacaagtgggacatgctgaa

SEQ ID NO: 12617 - DNA, 23 bp, Homo sapiens
tgaacaagtgggacatgctgaag

SEQ ID NO: 12618 - DNA, 23 bp, Homo sapiens
gaacaagtgggacatgctgaaga

SEQ ID NO: 12619 - DNA, 23 bp, Homo sapiens
aacaagtgggacatgctgaagag

SEQ ID NO: 12620 - DNA, 23 bp, Homo sapiens
acaagtgggacatgctgaagagg

SEQ ID NO: 12621 - DNA, 23 bp, Homo sapiens
caagtgggacatgctgaagaggg

SEQ ID NO: 12622 - DNA, 23 bp, Homo sapiens
aagtgggacatgctgaagagggg

SEQ ID NO: 12623 - DNA, 23 bp, Homo sapiens
agtgggacatgctgaagaggggc

SEQ ID NO: 12624 - DNA, 23 bp, Homo sapiens
gtgggacatgctgaagaggggcg

SEQ ID NO: 12625 - DNA, 23 bp, Homo sapiens
tgggacatgctgaagaggggcga

SEQ ID NO: 12626 - DNA, 23 bp, Homo sapiens
gggacatgctgaagaggggcgag

SEQ ID NO: 12627 - DNA, 23 bp, Homo sapiens
ggacatgctgaagaggggcgagg

SEQ ID NO: 12628 - DNA, 23 bp, Homo sapiens
gacatgctgaagaggggcgaggt

SEQ ID NO: 12629 - DNA, 23 bp, Homo sapiens
acatgctgaagaggggcgaggtg

SEQ ID NO: 12630 - DNA, 23 bp, Homo sapiens
catgctgaagaggggcgaggtgt

SEQ ID NO: 12631 - DNA, 23 bp, Homo sapiens
atgctgaagaggggcgaggtgtc

SEQ ID NO: 12632 - DNA, 23 bp, Homo sapiens
tgctgaagaggggcgaggtgtcg

SEQ ID NO: 12633 - DNA, 23 bp, Homo sapiens
gctgaagaggggcgaggtgtcgt

SEQ ID NO: 12634 - DNA, 23 bp, Homo sapiens
ctgaagaggggcgaggtgtcgtg

SEQ ID NO: 12635 - DNA, 23 bp, Homo sapiens
tgaagaggggcgaggtgtcgtgc

SEQ ID NO: 12636 - DNA, 23 bp, Homo sapiens
gaagaggggcgaggtgtcgtgct

SEQ ID NO: 12637 - DNA, 23 bp, Homo sapiens
aagaggggcgaggtgtcgtgctt

SEQ ID NO: 12638 - DNA, 23 bp, Homo sapiens
agaggggcgaggtgtcgtgcttc

SEQ ID NO: 12639 - DNA, 23 bp, Homo sapiens
gaggggcgaggtgtcgtgcttcc

SEQ ID NO: 12640 - DNA, 23 bp, Homo sapiens
aggggcgaggtgtcgtgcttccg

SEQ ID NO: 12641 - DNA, 23 bp, Homo sapiens
ggggcgaggtgtcgtgcttccgt

SEQ ID NO: 12642 - DNA, 23 bp, Homo sapiens
gggcgaggtgtcgtgcttccgtg

SEQ ID NO: 12643 - DNA, 23 bp, Homo sapiens
ggcgaggtgtcgtgcttccgtga

SEQ ID NO: 12644 - DNA, 23 bp, Homo sapiens
gcgaggtgtcgtgcttccgtgag

SEQ ID NO: 12645 - DNA, 23 bp, Homo sapiens
cgaggtgtcgtgcttccgtgagg

SEQ ID NO: 12646 - DNA, 23 bp, Homo sapiens
gaggtgtcgtgcttccgtgagga

SEQ ID NO: 12647 - DNA, 23 bp, Homo sapiens
aggtgtcgtgcttccgtgaggag

SEQ ID NO: 12648 - DNA, 23 bp, Homo sapiens
ggtgtcgtgcttccgtgaggaga

SEQ ID NO: 12649 - DNA, 23 bp, Homo sapiens
gtgtcgtgcttccgtgaggagag

SEQ ID NO: 12650 - DNA, 23 bp, Homo sapiens
tgtcgtgcttccgtgaggagagg

SEQ ID NO: 12651 - DNA, 23 bp, Homo sapiens
gtcgtgcttccgtgaggagaggg

SEQ ID NO: 12652 - DNA, 23 bp, Homo sapiens
tcgtgcttccgtgaggagaggga

SEQ ID NO: 12653 - DNA, 23 bp, Homo sapiens
cgtgcttccgtgaggagagggac

SEQ ID NO: 12654 - DNA, 23 bp, Homo sapiens
gtgcttccgtgaggagagggacg

SEQ ID NO: 12655 - DNA, 23 bp, Homo sapiens
tgcttccgtgaggagagggacgt

SEQ ID NO: 12656 - DNA, 23 bp, Homo sapiens
gcttccgtgaggagagggacgtg

SEQ ID NO: 12657 - DNA, 23 bp, Homo sapiens
cttccgtgaggagagggacgtgt

SEQ ID NO: 12658 - DNA, 23 bp, Homo sapiens
ttccgtgaggagagggacgtgtt

SEQ ID NO: 12659 - DNA, 23 bp, Homo sapiens
tccgtgaggagagggacgtgttg

SEQ ID NO: 12660 - DNA, 23 bp, Homo sapiens
ccgtgaggagagggacgtgttgg

SEQ ID NO: 12661 - DNA, 23 bp, Homo sapiens
cgtgaggagagggacgtgttggt

SEQ ID NO: 12662 - DNA, 23 bp, Homo sapiens
gtgaggagagggacgtgttggtg

SEQ ID NO: 12663 - DNA, 23 bp, Homo sapiens
tgaggagagggacgtgttggtga

SEQ ID NO: 12664 - DNA, 23 bp, Homo sapiens
gaggagagggacgtgttggtgaa

SEQ ID NO: 12665 - DNA, 23 bp, Homo sapiens
aggagagggacgtgttggtgaat

SEQ ID NO: 12666 - DNA, 23 bp, Homo sapiens
ggagagggacgtgttggtgaatg

SEQ ID NO: 12667 - DNA, 23 bp, Homo sapiens
gagagggacgtgttggtgaatgg

SEQ ID NO: 12668 - DNA, 23 bp, Homo sapiens
agagggacgtgttggtgaatggg

SEQ ID NO: 12669 - DNA, 23 bp, Homo sapiens
gagggacgtgttggtgaatgggg

SEQ ID NO: 12670 - DNA, 23 bp, Homo sapiens
agggacgtgttggtgaatgggga

SEQ ID NO: 12671 - DNA, 23 bp, Homo sapiens
gggacgtgttggtgaatggggac

SEQ ID NO: 12672 - DNA, 23 bp, Homo sapiens
ggacgtgttggtgaatggggacc

SEQ ID NO: 12673 - DNA, 23 bp, Homo sapiens
gacgtgttggtgaatggggaccg

SEQ ID NO: 12674 - DNA, 23 bp, Homo sapiens
acgtgttggtgaatggggaccgg

SEQ ID NO: 12675 - DNA, 23 bp, Homo sapiens
cgtgttggtgaatggggaccggc

SEQ ID NO: 12676 - DNA, 23 bp, Homo sapiens
gtgttggtgaatggggaccggcg

SEQ ID NO: 12677 - DNA, 23 bp, Homo sapiens
tgttggtgaatggggaccggcgg

SEQ ID NO: 12678 - DNA, 23 bp, Homo sapiens
gttggtgaatggggaccggcggt

SEQ ID NO: 12679 - DNA, 23 bp, Homo sapiens
ttggtgaatggggaccggcggtg

SEQ ID NO: 12680 - DNA, 23 bp, Homo sapiens
tggtgaatggggaccggcggtgg

SEQ ID NO: 12681 - DNA, 23 bp, Homo sapiens
ggtgaatggggaccggcggtgga

SEQ ID NO: 12682 - DNA, 23 bp, Homo sapiens
gtgaatggggaccggcggtggat

SEQ ID NO: 12683 - DNA, 23 bp, Homo sapiens
tgaatggggaccggcggtggatc

SEQ ID NO: 12684 - DNA, 23 bp, Homo sapiens
gaatggggaccggcggtggatca

SEQ ID NO: 12685 - DNA, 23 bp, Homo sapiens
aatggggaccggcggtggatcac

SEQ ID NO: 12686 - DNA, 23 bp, Homo sapiens
atggggaccggcggtggatcacg

SEQ ID NO: 12687 - DNA, 23 bp, Homo sapiens
tggggaccggcggtggatcacgc

SEQ ID NO: 12688 - DNA, 23 bp, Homo sapiens
ggggaccggcggtggatcacgca

SEQ ID NO: 12689 - DNA, 23 bp, Homo sapiens
gggaccggcggtggatcacgcag

SEQ ID NO: 12690 - DNA, 23 bp, Homo sapiens
ggaccggcggtggatcacgcagc

SEQ ID NO: 12691 - DNA, 23 bp, Homo sapiens
gaccggcggtggatcacgcagct

SEQ ID NO: 12692 - DNA, 23 bp, Homo sapiens
accggcggtggatcacgcagctg

SEQ ID NO: 12693 - DNA, 23 bp, Homo sapiens
ccggcggtggatcacgcagctgc

SEQ ID NO: 12694 - DNA, 23 bp, Homo sapiens
cggcggtggatcacgcagctgca

SEQ ID NO: 12695 - DNA, 23 bp, Homo sapiens
ggcggtggatcacgcagctgcac

SEQ ID NO: 12696 - DNA, 23 bp, Homo sapiens
gcggtggatcacgcagctgcact

SEQ ID NO: 12697 - DNA, 23 bp, Homo sapiens
cggtggatcacgcagctgcactt

SEQ ID NO: 12698 - DNA, 23 bp, Homo sapiens
ggtggatcacgcagctgcacttc

SEQ ID NO: 12699 - DNA, 23 bp, Homo sapiens
gtggatcacgcagctgcacttcg

SEQ ID NO: 12700 - DNA, 23 bp, Homo sapiens
tggatcacgcagctgcacttcgc

SEQ ID NO: 12701 - DNA, 23 bp, Homo sapiens
ggatcacgcagctgcacttcgcc

SEQ ID NO: 12702 - DNA, 23 bp, Homo sapiens
gatcacgcagctgcacttcgcct

SEQ ID NO: 12703 - DNA, 23 bp, Homo sapiens
atcacgcagctgcacttcgcctt

SEQ ID NO: 12704 - DNA, 23 bp, Homo sapiens
tcacgcagctgcacttcgccttc

SEQ ID NO: 12705 - DNA, 23 bp, Homo sapiens
cacgcagctgcacttcgccttcc

SEQ ID NO: 12706 - DNA, 23 bp, Homo sapiens
acgcagctgcacttcgccttcca

SEQ ID NO: 12707 - DNA, 23 bp, Homo sapiens
cgcagctgcacttcgccttccag

SEQ ID NO: 12708 - DNA, 23 bp, Homo sapiens
gcagctgcacttcgccttccagg

SEQ ID NO: 12709 - DNA, 23 bp, Homo sapiens
cagctgcacttcgccttccagga

SEQ ID NO: 12710 - DNA, 23 bp, Homo sapiens
agctgcacttcgccttccaggat

SEQ ID NO: 12711 - DNA, 23 bp, Homo sapiens
gctgcacttcgccttccaggatg

SEQ ID NO: 12712 - DNA, 23 bp, Homo sapiens
ctgcacttcgccttccaggatga

SEQ ID NO: 12713 - DNA, 23 bp, Homo sapiens
tgcacttcgccttccaggatgag

SEQ ID NO: 12714 - DNA, 23 bp, Homo sapiens
gcacttcgccttccaggatgaga

SEQ ID NO: 12715 - DNA, 23 bp, Homo sapiens
cacttcgccttccaggatgagaa

SEQ ID NO: 12716 - DNA, 23 bp, Homo sapiens
acttcgccttccaggatgagaac

SEQ ID NO: 12717 - DNA, 23 bp, Homo sapiens
cttcgccttccaggatgagaact

SEQ ID NO: 12718 - DNA, 23 bp, Homo sapiens
ttcgccttccaggatgagaacta

SEQ ID NO: 12719 - DNA, 23 bp, Homo sapiens
tcgccttccaggatgagaactac

SEQ ID NO: 12720 - DNA, 23 bp, Homo sapiens
cgccttccaggatgagaactacc

SEQ ID NO: 12721 - DNA, 23 bp, Homo sapiens
gccttccaggatgagaactacct

SEQ ID NO: 12722 - DNA, 23 bp, Homo sapiens
ccttccaggatgagaactacctg

SEQ ID NO: 12723 - DNA, 23 bp, Homo sapiens
cttccaggatgagaactacctgt

SEQ ID NO: 12724 - DNA, 23 bp, Homo sapiens
ttccaggatgagaactacctgta

SEQ ID NO: 12725 - DNA, 23 bp, Homo sapiens
tccaggatgagaactacctgtac

SEQ ID NO: 12726 - DNA, 23 bp, Homo sapiens
ccaggatgagaactacctgtacc

SEQ ID NO: 12727 - DNA, 23 bp, Homo sapiens
caggatgagaactacctgtacct

SEQ ID NO: 12728 - DNA, 23 bp, Homo sapiens
aggatgagaactacctgtacctg

SEQ ID NO: 12729 - DNA, 23 bp, Homo sapiens
ggatgagaactacctgtacctgg

SEQ ID NO: 12730 - DNA, 23 bp, Homo sapiens
gatgagaactacctgtacctggt

SEQ ID NO: 12731 - DNA, 23 bp, Homo sapiens
atgagaactacctgtacctggtc

SEQ ID NO: 12732 - DNA, 23 bp, Homo sapiens
tgagaactacctgtacctggtca

SEQ ID NO: 12733 - DNA, 23 bp, Homo sapiens
gagaactacctgtacctggtcat

SEQ ID NO: 12734 - DNA, 23 bp, Homo sapiens
agaactacctgtacctggtcatg

SEQ ID NO: 12735 - DNA, 23 bp, Homo sapiens
gaactacctgtacctggtcatgg

SEQ ID NO: 12736 - DNA, 23 bp, Homo sapiens
aactacctgtacctggtcatgga

SEQ ID NO: 12737 - DNA, 23 bp, Homo sapiens
actacctgtacctggtcatggag

SEQ ID NO: 12738 - DNA, 23 bp, Homo sapiens
ctacctgtacctggtcatggagt

SEQ ID NO: 12739 - DNA, 23 bp, Homo sapiens
tacctgtacctggtcatggagta

SEQ ID NO: 12740 - DNA, 23 bp, Homo sapiens
acctgtacctggtcatggagtat

SEQ ID NO: 12741 - DNA, 23 bp, Homo sapiens
cctgtacctggtcatggagtatt

SEQ ID NO: 12742 - DNA, 23 bp, Homo sapiens
ctgtacctggtcatggagtatta

SEQ ID NO: 12743 - DNA, 23 bp, Homo sapiens
tgtacctggtcatggagtattac

SEQ ID NO: 12744 - DNA, 23 bp, Homo sapiens
gtacctggtcatggagtattacg

SEQ ID NO: 12745 - DNA, 23 bp, Homo sapiens
tacctggtcatggagtattacgt

SEQ ID NO: 12746 - DNA, 23 bp, Homo sapiens
acctggtcatggagtattacgtg

SEQ ID NO: 12747 - DNA, 23 bp, Homo sapiens
cctggtcatggagtattacgtgg

SEQ ID NO: 12748 - DNA, 23 bp, Homo sapiens
ctggtcatggagtattacgtggg

SEQ ID NO: 12749 - DNA, 23 bp, Homo sapiens
tggtcatggagtattacgtgggc

SEQ ID NO: 12750 - DNA, 23 bp, Homo sapiens
ggtcatggagtattacgtgggcg

SEQ ID NO: 12751 - DNA, 23 bp, Homo sapiens
gtcatggagtattacgtgggcgg

SEQ ID NO: 12752 - DNA, 23 bp, Homo sapiens
tcatggagtattacgtgggcggg

SEQ ID NO: 12753 - DNA, 23 bp, Homo sapiens
catggagtattacgtgggcgggg

SEQ ID NO: 12754 - DNA, 23 bp, Homo sapiens
atggagtattacgtgggcgggga

SEQ ID NO: 12755 - DNA, 23 bp, Homo sapiens
tggagtattacgtgggcggggac

SEQ ID NO: 12756 - DNA, 23 bp, Homo sapiens
ggagtattacgtgggcggggacc

SEQ ID NO: 12757 - DNA, 23 bp, Homo sapiens
gagtattacgtgggcggggacct

SEQ ID NO: 12758 - DNA, 23 bp, Homo sapiens
agtattacgtgggcggggacctg

SEQ ID NO: 12759 - DNA, 23 bp, Homo sapiens
gtattacgtgggcggggacctgc

SEQ ID NO: 12760 - DNA, 23 bp, Homo sapiens
tattacgtgggcggggacctgct

SEQ ID NO: 12761 - DNA, 23 bp, Homo sapiens
attacgtgggcggggacctgctg

SEQ ID NO: 12762 - DNA, 23 bp, Homo sapiens
ttacgtgggcggggacctgctga

SEQ ID NO: 12763 - DNA, 23 bp, Homo sapiens
tacgtgggcggggacctgctgac

SEQ ID NO: 12764 - DNA, 23 bp, Homo sapiens
acgtgggcggggacctgctgaca

SEQ ID NO: 12765 - DNA, 23 bp, Homo sapiens
cgtgggcggggacctgctgacac

SEQ ID NO: 12766 - DNA, 23 bp, Homo sapiens
gtgggcggggacctgctgacact

SEQ ID NO: 12767 - DNA, 23 bp, Homo sapiens
tgggcggggacctgctgacactg

SEQ ID NO: 12768 - DNA, 23 bp, Homo sapiens
gggcggggacctgctgacactgc

SEQ ID NO: 12769 - DNA, 23 bp, Homo sapiens
ggcggggacctgctgacactgct

SEQ ID NO: 12770 - DNA, 23 bp, Homo sapiens
gcggggacctgctgacactgctg

SEQ ID NO: 12771 - DNA, 23 bp, Homo sapiens
cggggacctgctgacactgctga

SEQ ID NO: 12772 - DNA, 23 bp, Homo sapiens
ggggacctgctgacactgctgag

SEQ ID NO: 12773 - DNA, 23 bp, Homo sapiens
gggacctgctgacactgctgagc

SEQ ID NO: 12774 - DNA, 23 bp, Homo sapiens
ggacctgctgacactgctgagca

SEQ ID NO: 12775 - DNA, 23 bp, Homo sapiens
gacctgctgacactgctgagcaa

SEQ ID NO: 12776 - DNA, 23 bp, Homo sapiens
acctgctgacactgctgagcaag

SEQ ID NO: 12777 - DNA, 23 bp, Homo sapiens
cctgctgacactgctgagcaagt

SEQ ID NO: 12778 - DNA, 23 bp, Homo sapiens
ctgctgacactgctgagcaagtt

SEQ ID NO: 12779 - DNA, 23 bp, Homo sapiens
tgctgacactgctgagcaagttt

SEQ ID NO: 12780 - DNA, 23 bp, Homo sapiens
gctgacactgctgagcaagtttg

SEQ ID NO: 12781 - DNA, 23 bp, Homo sapiens
ctgacactgctgagcaagtttgg

SEQ ID NO: 12782 - DNA, 23 bp, Homo sapiens
tgacactgctgagcaagtttggg

SEQ ID NO: 12783 - DNA, 23 bp, Homo sapiens
gacactgctgagcaagtttgggg

SEQ ID NO: 12784 - DNA, 23 bp, Homo sapiens
acactgctgagcaagtttgggga

SEQ ID NO: 12785 - DNA, 23 bp, Homo sapiens
cactgctgagcaagtttggggag

SEQ ID NO: 12786 - DNA, 23 bp, Homo sapiens
actgctgagcaagtttggggagc

SEQ ID NO: 12787 - DNA, 23 bp, Homo sapiens
ctgctgagcaagtttggggagcg

SEQ ID NO: 12788 - DNA, 23 bp, Homo sapiens
tgctgagcaagtttggggagcgg

SEQ ID NO: 12789 - DNA, 23 bp, Homo sapiens
gctgagcaagtttggggagcgga

SEQ ID NO: 12790 - DNA, 23 bp, Homo sapiens
ctgagcaagtttggggagcggat

SEQ ID NO: 12791 - DNA, 23 bp, Homo sapiens
tgagcaagtttggggagcggatt

SEQ ID NO: 12792 - DNA, 23 bp, Homo sapiens
gagcaagtttggggagcggattc

SEQ ID NO: 12793 - DNA, 23 bp, Homo sapiens
agcaagtttggggagcggattcc

SEQ ID NO: 12794 - DNA, 23 bp, Homo sapiens
gcaagtttggggagcggattccg

SEQ ID NO: 12795 - DNA, 23 bp, Homo sapiens
caagtttggggagcggattccgg

SEQ ID NO: 12796 - DNA, 23 bp, Homo sapiens
aagtttggggagcggattccggc

SEQ ID NO: 12797 - DNA, 23 bp, Homo sapiens
agtttggggagcggattccggcc

SEQ ID NO: 12798 - DNA, 23 bp, Homo sapiens
gtttggggagcggattccggccg

SEQ ID NO: 12799 - DNA, 23 bp, Homo sapiens
tttggggagcggattccggccga

SEQ ID NO: 12800 - DNA, 23 bp, Homo sapiens
ttggggagcggattccggccgag

SEQ ID NO: 12801 - DNA, 23 bp, Homo sapiens
tggggagcggattccggccgaga

SEQ ID NO: 12802 - DNA, 23 bp, Homo sapiens
ggggagcggattccggccgagat

SEQ ID NO: 12803 - DNA, 23 bp, Homo sapiens
gggagcggattccggccgagatg

SEQ ID NO: 12804 - DNA, 23 bp, Homo sapiens
ggagcggattccggccgagatgg

SEQ ID NO: 12805 - DNA, 23 bp, Homo sapiens
gagcggattccggccgagatggc

SEQ ID NO: 12806 - DNA, 23 bp, Homo sapiens
agcggattccggccgagatggcg

SEQ ID NO: 12807 - DNA, 23 bp, Homo sapiens
gcggattccggccgagatggcgc

SEQ ID NO: 12808 - DNA, 23 bp, Homo sapiens
cggattccggccgagatggcgcg

SEQ ID NO: 12809 - DNA, 23 bp, Homo sapiens
ggattccggccgagatggcgcgc

SEQ ID NO: 12810 - DNA, 23 bp, Homo sapiens
gattccggccgagatggcgcgct

SEQ ID NO: 12811 - DNA, 23 bp, Homo sapiens
attccggccgagatggcgcgctt

SEQ ID NO: 12812 - DNA, 23 bp, Homo sapiens
ttccggccgagatggcgcgcttc

SEQ ID NO: 12813 - DNA, 23 bp, Homo sapiens
tccggccgagatggcgcgcttct

SEQ ID NO: 12814 - DNA, 23 bp, Homo sapiens
ccggccgagatggcgcgcttcta

SEQ ID NO: 12815 - DNA, 23 bp, Homo sapiens
cggccgagatggcgcgcttctac

SEQ ID NO: 12816 - DNA, 23 bp, Homo sapiens
ggccgagatggcgcgcttctacc

SEQ ID NO: 12817 - DNA, 23 bp, Homo sapiens
gccgagatggcgcgcttctacct

SEQ ID NO: 12818 - DNA, 23 bp, Homo sapiens
ccgagatggcgcgcttctacctg

SEQ ID NO: 12819 - DNA, 23 bp, Homo sapiens
cgagatggcgcgcttctacctgg

SEQ ID NO: 12820 - DNA, 23 bp, Homo sapiens
gagatggcgcgcttctacctggc

SEQ ID NO: 12821 - DNA, 23 bp, Homo sapiens
agatggcgcgcttctacctggcg

SEQ ID NO: 12822 - DNA, 23 bp, Homo sapiens
gatggcgcgcttctacctggcgg

SEQ ID NO: 12823 - DNA, 23 bp, Homo sapiens
atggcgcgcttctacctggcgga

SEQ ID NO: 12824 - DNA, 23 bp, Homo sapiens
tggcgcgcttctacctggcggag

SEQ ID NO: 12825 - DNA, 23 bp, Homo sapiens
ggcgcgcttctacctggcggaga

SEQ ID NO: 12826 - DNA, 23 bp, Homo sapiens
gcgcgcttctacctggcggagat

SEQ ID NO: 12827 - DNA, 23 bp, Homo sapiens
cgcgcttctacctggcggagatt

SEQ ID NO: 12828 - DNA, 23 bp, Homo sapiens
gcgcttctacctggcggagattg

SEQ ID NO: 12829 - DNA, 23 bp, Homo sapiens
cgcttctacctggcggagattgt

SEQ ID NO: 12830 - DNA, 23 bp, Homo sapiens
gcttctacctggcggagattgtc

SEQ ID NO: 12831 - DNA, 23 bp, Homo sapiens
cttctacctggcggagattgtca

SEQ ID NO: 12832 - DNA, 23 bp, Homo sapiens
ttctacctggcggagattgtcat

SEQ ID NO: 12833 - DNA, 23 bp, Homo sapiens
tctacctggcggagattgtcatg

SEQ ID NO: 12834 - DNA, 23 bp, Homo sapiens
ctacctggcggagattgtcatgg

SEQ ID NO: 12835 - DNA, 23 bp, Homo sapiens
tacctggcggagattgtcatggc

SEQ ID NO: 12836 - DNA, 23 bp, Homo sapiens
acctggcggagattgtcatggcc

SEQ ID NO: 12837 - DNA, 23 bp, Homo sapiens
cctggcggagattgtcatggcca

SEQ ID NO: 12838 - DNA, 23 bp, Homo sapiens
ctggcggagattgtcatggccat

SEQ ID NO: 12839 - DNA, 23 bp, Homo sapiens
tggcggagattgtcatggccata

SEQ ID NO: 12840 - DNA, 23 bp, Homo sapiens
ggcggagattgtcatggccatag

SEQ ID NO: 12841 - DNA, 23 bp, Homo sapiens
gcggagattgtcatggccataga

SEQ ID NO: 12842 - DNA, 23 bp, Homo sapiens
cggagattgtcatggccatagac

SEQ ID NO: 12843 - DNA, 23 bp, Homo sapiens
ggagattgtcatggccatagact

SEQ ID NO: 12844 - DNA, 23 bp, Homo sapiens
gagattgtcatggccatagactc

SEQ ID NO: 12845 - DNA, 23 bp, Homo sapiens
agattgtcatggccatagactcg

SEQ ID NO: 12846 - DNA, 23 bp, Homo sapiens
gattgtcatggccatagactcgg

SEQ ID NO: 12847 - DNA, 23 bp, Homo sapiens
attgtcatggccatagactcggt

SEQ ID NO: 12848 - DNA, 23 bp, Homo sapiens
ttgtcatggccatagactcggtg

SEQ ID NO: 12849 - DNA, 23 bp, Homo sapiens
tgtcatggccatagactcggtgc

SEQ ID NO: 12850 - DNA, 23 bp, Homo sapiens
gtcatggccatagactcggtgca

SEQ ID NO: 12851 - DNA, 23 bp, Homo sapiens
tcatggccatagactcggtgcac

SEQ ID NO: 12852 - DNA, 23 bp, Homo sapiens
catggccatagactcggtgcacc

SEQ ID NO: 12853 - DNA, 23 bp, Homo sapiens
atggccatagactcggtgcaccg

SEQ ID NO: 12854 - DNA, 23 bp, Homo sapiens
tggccatagactcggtgcaccgg

SEQ ID NO: 12855 - DNA, 23 bp, Homo sapiens
ggccatagactcggtgcaccggc

SEQ ID NO: 12856 - DNA, 23 bp, Homo sapiens
gccatagactcggtgcaccggct

SEQ ID NO: 12857 - DNA, 23 bp, Homo sapiens
ccatagactcggtgcaccggctt

SEQ ID NO: 12858 - DNA, 23 bp, Homo sapiens
catagactcggtgcaccggcttg

SEQ ID NO: 12859 - DNA, 23 bp, Homo sapiens
atagactcggtgcaccggcttgg

SEQ ID NO: 12860 - DNA, 23 bp, Homo sapiens
tagactcggtgcaccggcttggc

SEQ ID NO: 12861 - DNA, 23 bp, Homo sapiens
agactcggtgcaccggcttggct

SEQ ID NO: 12862 - DNA, 23 bp, Homo sapiens
gactcggtgcaccggcttggcta

SEQ ID NO: 12863 - DNA, 23 bp, Homo sapiens
actcggtgcaccggcttggctac

SEQ ID NO: 12864 - DNA, 23 bp, Homo sapiens
ctcggtgcaccggcttggctacg

SEQ ID NO: 12865 - DNA, 23 bp, Homo sapiens
tcggtgcaccggcttggctacgt

SEQ ID NO: 12866 - DNA, 23 bp, Homo sapiens
cggtgcaccggcttggctacgtg

SEQ ID NO: 12867 - DNA, 23 bp, Homo sapiens
ggtgcaccggcttggctacgtgc

SEQ ID NO: 12868 - DNA, 23 bp, Homo sapiens
gtgcaccggcttggctacgtgca

SEQ ID NO: 12869 - DNA, 23 bp, Homo sapiens
tgcaccggcttggctacgtgcac

SEQ ID NO: 12870 - DNA, 23 bp, Homo sapiens
gcaccggcttggctacgtgcaca

SEQ ID NO: 12871 - DNA, 23 bp, Homo sapiens
caccggcttggctacgtgcacag

SEQ ID NO: 12872 - DNA, 23 bp, Homo sapiens
accggcttggctacgtgcacagg

SEQ ID NO: 12873 - DNA, 23 bp, Homo sapiens
ccggcttggctacgtgcacaggg

SEQ ID NO: 12874 - DNA, 23 bp, Homo sapiens
cggcttggctacgtgcacaggga

SEQ ID NO: 12875 - DNA, 23 bp, Homo sapiens
ggcttggctacgtgcacagggac

SEQ ID NO: 12876 - DNA, 23 bp, Homo sapiens
gcttggctacgtgcacagggaca

SEQ ID NO: 12877 - DNA, 23 bp, Homo sapiens
cttggctacgtgcacagggacat

SEQ ID NO: 12878 - DNA, 23 bp, Homo sapiens
ttggctacgtgcacagggacatc

SEQ ID NO: 12879 - DNA, 23 bp, Homo sapiens
tggctacgtgcacagggacatca

SEQ ID NO: 12880 - DNA, 23 bp, Homo sapiens
ggctacgtgcacagggacatcaa

SEQ ID NO: 12881 - DNA, 23 bp, Homo sapiens
gctacgtgcacagggacatcaaa

SEQ ID NO: 12882 - DNA, 23 bp, Homo sapiens
ctacgtgcacagggacatcaaac

SEQ ID NO: 12883 - DNA, 23 bp, Homo sapiens
tacgtgcacagggacatcaaacc

SEQ ID NO: 12884 - DNA, 23 bp, Homo sapiens
acgtgcacagggacatcaaaccc

SEQ ID NO: 12885 - DNA, 23 bp, Homo sapiens
cgtgcacagggacatcaaacccg

SEQ ID NO: 12886 - DNA, 23 bp, Homo sapiens
gtgcacagggacatcaaacccga

SEQ ID NO: 12887 - DNA, 23 bp, Homo sapiens
tgcacagggacatcaaacccgac

SEQ ID NO: 12888 - DNA, 23 bp, Homo sapiens
gcacagggacatcaaacccgaca

SEQ ID NO: 12889 - DNA, 23 bp, Homo sapiens
cacagggacatcaaacccgacaa

SEQ ID NO: 12890 - DNA, 23 bp, Homo sapiens
acagggacatcaaacccgacaac

SEQ ID NO: 12891 - DNA, 23 bp, Homo sapiens
cagggacatcaaacccgacaaca

SEQ ID NO: 12892 - DNA, 23 bp, Homo sapiens
agggacatcaaacccgacaacat

SEQ ID NO: 12893 - DNA, 23 bp, Homo sapiens
gggacatcaaacccgacaacatc

SEQ ID NO: 12894 - DNA, 23 bp, Homo sapiens
ggacatcaaacccgacaacatcc

SEQ ID NO: 12895 - DNA, 23 bp, Homo sapiens
gacatcaaacccgacaacatcct

SEQ ID NO: 12896 - DNA, 23 bp, Homo sapiens
acatcaaacccgacaacatcctg

SEQ ID NO: 12897 - DNA, 23 bp, Homo sapiens
catcaaacccgacaacatcctgc

SEQ ID NO: 12898 - DNA, 23 bp, Homo sapiens
atcaaacccgacaacatcctgct

SEQ ID NO: 12899 - DNA, 23 bp, Homo sapiens
tcaaacccgacaacatcctgctg

SEQ ID NO: 12900 - DNA, 23 bp, Homo sapiens
caaacccgacaacatcctgctgg

SEQ ID NO: 12901 - DNA, 23 bp, Homo sapiens
aaacccgacaacatcctgctgga

SEQ ID NO: 12902 - DNA, 23 bp, Homo sapiens
aacccgacaacatcctgctggac

SEQ ID NO: 12903 - DNA, 23 bp, Homo sapiens
acccgacaacatcctgctggacc

SEQ ID NO: 12904 - DNA, 23 bp, Homo sapiens
cccgacaacatcctgctggaccg

SEQ ID NO: 12905 - DNA, 23 bp, Homo sapiens
ccgacaacatcctgctggaccgc

SEQ ID NO: 12906 - DNA, 23 bp, Homo sapiens
cgacaacatcctgctggaccgct

SEQ ID NO: 12907 - DNA, 23 bp, Homo sapiens
gacaacatcctgctggaccgctg

SEQ ID NO: 12908 - DNA, 23 bp, Homo sapiens
acaacatcctgctggaccgctgt

SEQ ID NO: 12909 - DNA, 23 bp, Homo sapiens
caacatcctgctggaccgctgtg

SEQ ID NO: 12910 - DNA, 23 bp, Homo sapiens
aacatcctgctggaccgctgtgg

SEQ ID NO: 12911 - DNA, 23 bp, Homo sapiens
acatcctgctggaccgctgtggc

SEQ ID NO: 12912 - DNA, 23 bp, Homo sapiens
catcctgctggaccgctgtggcc

SEQ ID NO: 12913 - DNA, 23 bp, Homo sapiens
atcctgctggaccgctgtggcca

SEQ ID NO: 12914 - DNA, 23 bp, Homo sapiens
tcctgctggaccgctgtggccac

SEQ ID NO: 12915 - DNA, 23 bp, Homo sapiens
cctgctggaccgctgtggccaca

SEQ ID NO: 12916 - DNA, 23 bp, Homo sapiens
ctgctggaccgctgtggccacat

SEQ ID NO: 12917 - DNA, 23 bp, Homo sapiens
tgctggaccgctgtggccacatc

SEQ ID NO: 12918 - DNA, 23 bp, Homo sapiens
gctggaccgctgtggccacatcc

SEQ ID NO: 12919 - DNA, 23 bp, Homo sapiens
ctggaccgctgtggccacatccg

SEQ ID NO: 12920 - DNA, 23 bp, Homo sapiens
tggaccgctgtggccacatccgc

SEQ ID NO: 12921 - DNA, 23 bp, Homo sapiens
ggaccgctgtggccacatccgcc

SEQ ID NO: 12922 - DNA, 23 bp, Homo sapiens
gaccgctgtggccacatccgcct

SEQ ID NO: 12923 - DNA, 23 bp, Homo sapiens
accgctgtggccacatccgcctg

SEQ ID NO: 12924 - DNA, 23 bp, Homo sapiens
ccgctgtggccacatccgcctgg

SEQ ID NO: 12925 - DNA, 23 bp, Homo sapiens
cgctgtggccacatccgcctggc

SEQ ID NO: 12926 - DNA, 23 bp, Homo sapiens
gctgtggccacatccgcctggcc

SEQ ID NO: 12927 - DNA, 23 bp, Homo sapiens
ctgtggccacatccgcctggccg

SEQ ID NO: 12928 - DNA, 23 bp, Homo sapiens
tgtggccacatccgcctggccga

SEQ ID NO: 12929 - DNA, 23 bp, Homo sapiens
gtggccacatccgcctggccgac

SEQ ID NO: 12930 - DNA, 23 bp, Homo sapiens
tggccacatccgcctggccgact

SEQ ID NO: 12931 - DNA, 23 bp, Homo sapiens
ggccacatccgcctggccgactt

SEQ ID NO: 12932 - DNA, 23 bp, Homo sapiens
gccacatccgcctggccgacttc

SEQ ID NO: 12933 - DNA, 23 bp, Homo sapiens
ccacatccgcctggccgacttcg

SEQ ID NO: 12934 - DNA, 23 bp, Homo sapiens
cacatccgcctggccgacttcgg

SEQ ID NO: 12935 - DNA, 23 bp, Homo sapiens
acatccgcctggccgacttcggc

SEQ ID NO: 12936 - DNA, 23 bp, Homo sapiens
catccgcctggccgacttcggct

SEQ ID NO: 12937 - DNA, 23 bp, Homo sapiens
atccgcctggccgacttcggctc

SEQ ID NO: 12938 - DNA, 23 bp, Homo sapiens
tccgcctggccgacttcggctct

SEQ ID NO: 12939 - DNA, 23 bp, Homo sapiens
ccgcctggccgacttcggctctt

SEQ ID NO: 12940 - DNA, 23 bp, Homo sapiens
cgcctggccgacttcggctcttg

SEQ ID NO: 12941 - DNA, 23 bp, Homo sapiens
gcctggccgacttcggctcttgc

SEQ ID NO: 12942 - DNA, 23 bp, Homo sapiens
cctggccgacttcggctcttgcc

SEQ ID NO: 12943 - DNA, 23 bp, Homo sapiens
ctggccgacttcggctcttgcct

SEQ ID NO: 12944 - DNA, 23 bp, Homo sapiens
tggccgacttcggctcttgcctc

SEQ ID NO: 12945 - DNA, 23 bp, Homo sapiens
ggccgacttcggctcttgcctca

SEQ ID NO: 12946 - DNA, 23 bp, Homo sapiens
gccgacttcggctcttgcctcaa

SEQ ID NO: 12947 - DNA, 23 bp, Homo sapiens
ccgacttcggctcttgcctcaag

SEQ ID NO: 12948 - DNA, 23 bp, Homo sapiens
cgacttcggctcttgcctcaagc

SEQ ID NO: 12949 - DNA, 23 bp, Homo sapiens
gacttcggctcttgcctcaagct

SEQ ID NO: 12950 - DNA, 23 bp, Homo sapiens
acttcggctcttgcctcaagctg

SEQ ID NO: 12951 - DNA, 23 bp, Homo sapiens
cttcggctcttgcctcaagctgc

SEQ ID NO: 12952 - DNA, 23 bp, Homo sapiens
ttcggctcttgcctcaagctgcg

SEQ ID NO: 12953 - DNA, 23 bp, Homo sapiens
tcggctcttgcctcaagctgcgg

SEQ ID NO: 12954 - DNA, 23 bp, Homo sapiens
cggctcttgcctcaagctgcggg

SEQ ID NO: 12955 - DNA, 23 bp, Homo sapiens
ggctcttgcctcaagctgcgggc

SEQ ID NO: 12956 - DNA, 23 bp, Homo sapiens
gctcttgcctcaagctgcgggca

SEQ ID NO: 12957 - DNA, 23 bp, Homo sapiens
ctcttgcctcaagctgcgggcag

SEQ ID NO: 12958 - DNA, 23 bp, Homo sapiens
tcttgcctcaagctgcgggcaga

SEQ ID NO: 12959 - DNA, 23 bp, Homo sapiens
cttgcctcaagctgcgggcagat

SEQ ID NO: 12960 - DNA, 23 bp, Homo sapiens
ttgcctcaagctgcgggcagatg

SEQ ID NO: 12961 - DNA, 23 bp, Homo sapiens
tgcctcaagctgcgggcagatgg

SEQ ID NO: 12962 - DNA, 23 bp, Homo sapiens
gcctcaagctgcgggcagatgga

SEQ ID NO: 12963 - DNA, 23 bp, Homo sapiens
cctcaagctgcgggcagatggaa

SEQ ID NO: 12964 - DNA, 23 bp, Homo sapiens
ctcaagctgcgggcagatggaac

SEQ ID NO: 12965 - DNA, 23 bp, Homo sapiens
tcaagctgcgggcagatggaacg

SEQ ID NO: 12966 - DNA, 23 bp, Homo sapiens
caagctgcgggcagatggaacgg

SEQ ID NO: 12967 - DNA, 23 bp, Homo sapiens
aagctgcgggcagatggaacggt

SEQ ID NO: 12968 - DNA, 23 bp, Homo sapiens
agctgcgggcagatggaacggtg

SEQ ID NO: 12969 - DNA, 23 bp, Homo sapiens
gctgcgggcagatggaacggtgc

SEQ ID NO: 12970 - DNA, 23 bp, Homo sapiens
ctgcgggcagatggaacggtgcg

SEQ ID NO: 12971 - DNA, 23 bp, Homo sapiens
tgcgggcagatggaacggtgcgg

SEQ ID NO: 12972 - DNA, 23 bp, Homo sapiens
gcgggcagatggaacggtgcggt

SEQ ID NO: 12973 - DNA, 23 bp, Homo sapiens
cgggcagatggaacggtgcggtc

SEQ ID NO: 12974 - DNA, 23 bp, Homo sapiens
gggcagatggaacggtgcggtcg

SEQ ID NO: 12975 - DNA, 23 bp, Homo sapiens
ggcagatggaacggtgcggtcgc

SEQ ID NO: 12976 - DNA, 23 bp, Homo sapiens
gcagatggaacggtgcggtcgct

SEQ ID NO: 12977 - DNA, 23 bp, Homo sapiens
cagatggaacggtgcggtcgctg

SEQ ID NO: 12978 - DNA, 23 bp, Homo sapiens
agatggaacggtgcggtcgctgg

SEQ ID NO: 12979 - DNA, 23 bp, Homo sapiens
gatggaacggtgcggtcgctggt

SEQ ID NO: 12980 - DNA, 23 bp, Homo sapiens
atggaacggtgcggtcgctggtg

SEQ ID NO: 12981 - DNA, 23 bp, Homo sapiens
tggaacggtgcggtcgctggtgg

SEQ ID NO: 12982 - DNA, 23 bp, Homo sapiens
ggaacggtgcggtcgctggtggc

SEQ ID NO: 12983 - DNA, 23 bp, Homo sapiens
gaacggtgcggtcgctggtggct

SEQ ID NO: 12984 - DNA, 23 bp, Homo sapiens
aacggtgcggtcgctggtggctg

SEQ ID NO: 12985 - DNA, 23 bp, Homo sapiens
acggtgcggtcgctggtggctgt

SEQ ID NO: 12986 - DNA, 23 bp, Homo sapiens
cggtgcggtcgctggtggctgtg

SEQ ID NO: 12987 - DNA, 23 bp, Homo sapiens
ggtgcggtcgctggtggctgtgg

SEQ ID NO: 12988 - DNA, 23 bp, Homo sapiens
gtgcggtcgctggtggctgtggg

SEQ ID NO: 12989 - DNA, 23 bp, Homo sapiens
tgcggtcgctggtggctgtgggc

SEQ ID NO: 12990 - DNA, 23 bp, Homo sapiens
gcggtcgctggtggctgtgggca

SEQ ID NO: 12991 - DNA, 23 bp, Homo sapiens
cggtcgctggtggctgtgggcac

SEQ ID NO: 12992 - DNA, 23 bp, Homo sapiens
ggtcgctggtggctgtgggcacc

SEQ ID NO: 12993 - DNA, 23 bp, Homo sapiens
gtcgctggtggctgtgggcaccc

SEQ ID NO: 12994 - DNA, 23 bp, Homo sapiens
tcgctggtggctgtgggcacccc

SEQ ID NO: 12995 - DNA, 23 bp, Homo sapiens
cgctggtggctgtgggcacccca

SEQ ID NO: 12996 - DNA, 23 bp, Homo sapiens
gctggtggctgtgggcaccccag

SEQ ID NO: 12997 - DNA, 23 bp, Homo sapiens
ctggtggctgtgggcaccccaga

SEQ ID NO: 12998 - DNA, 23 bp, Homo sapiens
tggtggctgtgggcaccccagac

SEQ ID NO: 12999 - DNA, 23 bp, Homo sapiens
ggtggctgtgggcaccccagact

SEQ ID NO: 13000 - DNA, 23 bp, Homo sapiens
gtggctgtgggcaccccagacta

SEQ ID NO: 13001 - DNA, 23 bp, Homo sapiens
tggctgtgggcaccccagactac

SEQ ID NO: 13002 - DNA, 23 bp, Homo sapiens
ggctgtgggcaccccagactacc

SEQ ID NO: 13003 - DNA, 23 bp, Homo sapiens
gctgtgggcaccccagactacct

SEQ ID NO: 13004 - DNA, 23 bp, Homo sapiens
ctgtgggcaccccagactacctg

SEQ ID NO: 13005 - DNA, 23 bp, Homo sapiens
tgtgggcaccccagactacctgt

SEQ ID NO: 13006 - DNA, 23 bp, Homo sapiens
gtgggcaccccagactacctgtc

SEQ ID NO: 13007 - DNA, 23 bp, Homo sapiens
tgggcaccccagactacctgtcc

SEQ ID NO: 13008 - DNA, 23 bp, Homo sapiens
gggcaccccagactacctgtccc

SEQ ID NO: 13009 - DNA, 23 bp, Homo sapiens
ggcaccccagactacctgtcccc

SEQ ID NO: 13010 - DNA, 23 bp, Homo sapiens
gcaccccagactacctgtccccc

SEQ ID NO: 13011 - DNA, 23 bp, Homo sapiens
caccccagactacctgtcccccg

SEQ ID NO: 13012 - DNA, 23 bp, Homo sapiens
accccagactacctgtcccccga

SEQ ID NO: 13013 - DNA, 23 bp, Homo sapiens
ccccagactacctgtcccccgag

SEQ ID NO: 13014 - DNA, 23 bp, Homo sapiens
cccagactacctgtcccccgaga

SEQ ID NO: 13015 - DNA, 23 bp, Homo sapiens
ccagactacctgtcccccgagat

SEQ ID NO: 13016 - DNA, 23 bp, Homo sapiens
cagactacctgtcccccgagatc

SEQ ID NO: 13017 - DNA, 23 bp, Homo sapiens
agactacctgtcccccgagatcc

SEQ ID NO: 13018 - DNA, 23 bp, Homo sapiens
gactacctgtcccccgagatcct

SEQ ID NO: 13019 - DNA, 23 bp, Homo sapiens
actacctgtcccccgagatcctg

SEQ ID NO: 13020 - DNA, 23 bp, Homo sapiens
ctacctgtcccccgagatcctgc

SEQ ID NO: 13021 - DNA, 23 bp, Homo sapiens
tacctgtcccccgagatcctgca

SEQ ID NO: 13022 - DNA, 23 bp, Homo sapiens
acctgtcccccgagatcctgcag

SEQ ID NO: 13023 - DNA, 23 bp, Homo sapiens
cctgtcccccgagatcctgcagg

SEQ ID NO: 13024 - DNA, 23 bp, Homo sapiens
ctgtcccccgagatcctgcaggc

SEQ ID NO: 13025 - DNA, 23 bp, Homo sapiens
tgtcccccgagatcctgcaggct

SEQ ID NO: 13026 - DNA, 23 bp, Homo sapiens
gtcccccgagatcctgcaggctg

SEQ ID NO: 13027 - DNA, 23 bp, Homo sapiens
tcccccgagatcctgcaggctgt

SEQ ID NO: 13028 - DNA, 23 bp, Homo sapiens
cccccgagatcctgcaggctgtg

SEQ ID NO: 13029 - DNA, 23 bp, Homo sapiens
ccccgagatcctgcaggctgtgg

SEQ ID NO: 13030 - DNA, 23 bp, Homo sapiens
cccgagatcctgcaggctgtggg

SEQ ID NO: 13031 - DNA, 23 bp, Homo sapiens
ccgagatcctgcaggctgtgggc

SEQ ID NO: 13032 - DNA, 23 bp, Homo sapiens
cgagatcctgcaggctgtgggcg

SEQ ID NO: 13033 - DNA, 23 bp, Homo sapiens
gagatcctgcaggctgtgggcgg

SEQ ID NO: 13034 - DNA, 23 bp, Homo sapiens
agatcctgcaggctgtgggcggt

SEQ ID NO: 13035 - DNA, 23 bp, Homo sapiens
gatcctgcaggctgtgggcggtg

SEQ ID NO: 13036 - DNA, 23 bp, Homo sapiens
atcctgcaggctgtgggcggtgg

SEQ ID NO: 13037 - DNA, 23 bp, Homo sapiens
tcctgcaggctgtgggcggtggg

SEQ ID NO: 13038 - DNA, 23 bp, Homo sapiens
cctgcaggctgtgggcggtgggc

SEQ ID NO: 13039 - DNA, 23 bp, Homo sapiens
ctgcaggctgtgggcggtgggcc

SEQ ID NO: 13040 - DNA, 23 bp, Homo sapiens
tgcaggctgtgggcggtgggcct

SEQ ID NO: 13041 - DNA, 23 bp, Homo sapiens
gcaggctgtgggcggtgggcctg

SEQ ID NO: 13042 - DNA, 23 bp, Homo sapiens
caggctgtgggcggtgggcctgg

SEQ ID NO: 13043 - DNA, 23 bp, Homo sapiens
aggctgtgggcggtgggcctggg

SEQ ID NO: 13044 - DNA, 23 bp, Homo sapiens
ggctgtgggcggtgggcctggga

SEQ ID NO: 13045 - DNA, 23 bp, Homo sapiens
gctgtgggcggtgggcctgggac

SEQ ID NO: 13046 - DNA, 23 bp, Homo sapiens
ctgtgggcggtgggcctgggaca

SEQ ID NO: 13047 - DNA, 23 bp, Homo sapiens
tgtgggcggtgggcctgggacag

SEQ ID NO: 13048 - DNA, 23 bp, Homo sapiens
gtgggcggtgggcctgggacagg

SEQ ID NO: 13049 - DNA, 23 bp, Homo sapiens
tgggcggtgggcctgggacaggc

SEQ ID NO: 13050 - DNA, 23 bp, Homo sapiens
gggcggtgggcctgggacaggca

SEQ ID NO: 13051 - DNA, 23 bp, Homo sapiens
ggcggtgggcctgggacaggcag

SEQ ID NO: 13052 - DNA, 23 bp, Homo sapiens
gcggtgggcctgggacaggcagc

SEQ ID NO: 13053 - DNA, 23 bp, Homo sapiens
cggtgggcctgggacaggcagct

SEQ ID NO: 13054 - DNA, 23 bp, Homo sapiens
ggtgggcctgggacaggcagcta

SEQ ID NO: 13055 - DNA, 23 bp, Homo sapiens
gtgggcctgggacaggcagctac

SEQ ID NO: 13056 - DNA, 23 bp, Homo sapiens
tgggcctgggacaggcagctacg

SEQ ID NO: 13057 - DNA, 23 bp, Homo sapiens
gggcctgggacaggcagctacgg

SEQ ID NO: 13058 - DNA, 23 bp, Homo sapiens
ggcctgggacaggcagctacggg

SEQ ID NO: 13059 - DNA, 23 bp, Homo sapiens
gcctgggacaggcagctacgggc

SEQ ID NO: 13060 - DNA, 23 bp, Homo sapiens
cctgggacaggcagctacgggcc

SEQ ID NO: 13061 - DNA, 23 bp, Homo sapiens
ctgggacaggcagctacgggccc

SEQ ID NO: 13062 - DNA, 23 bp, Homo sapiens
tgggacaggcagctacgggcccg

SEQ ID NO: 13063 - DNA, 23 bp, Homo sapiens
gggacaggcagctacgggcccga

SEQ ID NO: 13064 - DNA, 23 bp, Homo sapiens
ggacaggcagctacgggcccgag

SEQ ID NO: 13065 - DNA, 23 bp, Homo sapiens
gacaggcagctacgggcccgagt

SEQ ID NO: 13066 - DNA, 23 bp, Homo sapiens
acaggcagctacgggcccgagtg

SEQ ID NO: 13067 - DNA, 23 bp, Homo sapiens
caggcagctacgggcccgagtgt

SEQ ID NO: 13068 - DNA, 23 bp, Homo sapiens
aggcagctacgggcccgagtgtg

SEQ ID NO: 13069 - DNA, 23 bp, Homo sapiens
ggcagctacgggcccgagtgtga

SEQ ID NO: 13070 - DNA, 23 bp, Homo sapiens
gcagctacgggcccgagtgtgac

SEQ ID NO: 13071 - DNA, 23 bp, Homo sapiens
cagctacgggcccgagtgtgact

SEQ ID NO: 13072 - DNA, 23 bp, Homo sapiens
agctacgggcccgagtgtgactg

SEQ ID NO: 13073 - DNA, 23 bp, Homo sapiens
gctacgggcccgagtgtgactgg

SEQ ID NO: 13074 - DNA, 23 bp, Homo sapiens
ctacgggcccgagtgtgactggt

SEQ ID NO: 13075 - DNA, 23 bp, Homo sapiens
tacgggcccgagtgtgactggtg

SEQ ID NO: 13076 - DNA, 23 bp, Homo sapiens
acgggcccgagtgtgactggtgg

SEQ ID NO: 13077 - DNA, 23 bp, Homo sapiens
cgggcccgagtgtgactggtggg

SEQ ID NO: 13078 - DNA, 23 bp, Homo sapiens
gggcccgagtgtgactggtgggc

SEQ ID NO: 13079 - DNA, 23 bp, Homo sapiens
ggcccgagtgtgactggtgggcg

SEQ ID NO: 13080 - DNA, 23 bp, Homo sapiens
gcccgagtgtgactggtgggcgc

SEQ ID NO: 13081 - DNA, 23 bp, Homo sapiens
cccgagtgtgactggtgggcgct

SEQ ID NO: 13082 - DNA, 23 bp, Homo sapiens
ccgagtgtgactggtgggcgctg

SEQ ID NO: 13083 - DNA, 23 bp, Homo sapiens
cgagtgtgactggtgggcgctgg

SEQ ID NO: 13084 - DNA, 23 bp, Homo sapiens
gagtgtgactggtgggcgctggg

SEQ ID NO: 13085 - DNA, 23 bp, Homo sapiens
agtgtgactggtgggcgctgggt

SEQ ID NO: 13086 - DNA, 23 bp, Homo sapiens
gtgtgactggtgggcgctgggtg

SEQ ID NO: 13087 - DNA, 23 bp, Homo sapiens
tgtgactggtgggcgctgggtgt

SEQ ID NO: 13088 - DNA, 23 bp, Homo sapiens
gtgactggtgggcgctgggtgta

SEQ ID NO: 13089 - DNA, 23 bp, Homo sapiens
tgactggtgggcgctgggtgtat

SEQ ID NO: 13090 - DNA, 23 bp, Homo sapiens
gactggtgggcgctgggtgtatt

SEQ ID NO: 13091 - DNA, 23 bp, Homo sapiens
actggtgggcgctgggtgtattc

SEQ ID NO: 13092 - DNA, 23 bp, Homo sapiens
ctggtgggcgctgggtgtattcg

SEQ ID NO: 13093 - DNA, 23 bp, Homo sapiens
tggtgggcgctgggtgtattcgc

SEQ ID NO: 13094 - DNA, 23 bp, Homo sapiens
ggtgggcgctgggtgtattcgcc

SEQ ID NO: 13095 - DNA, 23 bp, Homo sapiens
gtgggcgctgggtgtattcgcct

SEQ ID NO: 13096 - DNA, 23 bp, Homo sapiens
tgggcgctgggtgtattcgccta

SEQ ID NO: 13097 - DNA, 23 bp, Homo sapiens
gggcgctgggtgtattcgcctat

SEQ ID NO: 13098 - DNA, 23 bp, Homo sapiens
ggcgctgggtgtattcgcctatg

SEQ ID NO: 13099 - DNA, 23 bp, Homo sapiens
gcgctgggtgtattcgcctatga

SEQ ID NO: 13100 - DNA, 23 bp, Homo sapiens
cgctgggtgtattcgcctatgaa

SEQ ID NO: 13101 - DNA, 23 bp, Homo sapiens
gctgggtgtattcgcctatgaaa

SEQ ID NO: 13102 - DNA, 23 bp, Homo sapiens
ctgggtgtattcgcctatgaaat

SEQ ID NO: 13103 - DNA, 23 bp, Homo sapiens
tgggtgtattcgcctatgaaatg

SEQ ID NO: 13104 - DNA, 23 bp, Homo sapiens
gggtgtattcgcctatgaaatgt

SEQ ID NO: 13105 - DNA, 23 bp, Homo sapiens
ggtgtattcgcctatgaaatgtt

SEQ ID NO: 13106 - DNA, 23 bp, Homo sapiens
gtgtattcgcctatgaaatgttc

SEQ ID NO: 13107 - DNA, 23 bp, Homo sapiens
tgtattcgcctatgaaatgttct

SEQ ID NO: 13108 - DNA, 23 bp, Homo sapiens
gtattcgcctatgaaatgttcta

SEQ ID NO: 13109 - DNA, 23 bp, Homo sapiens
tattcgcctatgaaatgttctat

SEQ ID NO: 13110 - DNA, 23 bp, Homo sapiens
attcgcctatgaaatgttctatg

SEQ ID NO: 13111 - DNA, 23 bp, Homo sapiens
ttcgcctatgaaatgttctatgg

SEQ ID NO: 13112 - DNA, 23 bp, Homo sapiens
tcgcctatgaaatgttctatggg

SEQ ID NO: 13113 - DNA, 23 bp, Homo sapiens
cgcctatgaaatgttctatgggc

SEQ ID NO: 13114 - DNA, 23 bp, Homo sapiens
gcctatgaaatgttctatgggca

SEQ ID NO: 13115 - DNA, 23 bp, Homo sapiens
cctatgaaatgttctatgggcag

SEQ ID NO: 13116 - DNA, 23 bp, Homo sapiens
ctatgaaatgttctatgggcaga

SEQ ID NO: 13117 - DNA, 23 bp, Homo sapiens
tatgaaatgttctatgggcagac

SEQ ID NO: 13118 - DNA, 23 bp, Homo sapiens
atgaaatgttctatgggcagacg

SEQ ID NO: 13119 - DNA, 23 bp, Homo sapiens
tgaaatgttctatgggcagacgc

SEQ ID NO: 13120 - DNA, 23 bp, Homo sapiens
gaaatgttctatgggcagacgcc

SEQ ID NO: 13121 - DNA, 23 bp, Homo sapiens
aaatgttctatgggcagacgccc

SEQ ID NO: 13122 - DNA, 23 bp, Homo sapiens
aatgttctatgggcagacgccct

SEQ ID NO: 13123 - DNA, 23 bp, Homo sapiens
atgttctatgggcagacgccctt

SEQ ID NO: 13124 - DNA, 23 bp, Homo sapiens
tgttctatgggcagacgcccttc

SEQ ID NO: 13125 - DNA, 23 bp, Homo sapiens
gttctatgggcagacgcccttct

SEQ ID NO: 13126 - DNA, 23 bp, Homo sapiens
ttctatgggcagacgcccttcta

SEQ ID NO: 13127 - DNA, 23 bp, Homo sapiens
tctatgggcagacgcccttctac

SEQ ID NO: 13128 - DNA, 23 bp, Homo sapiens
ctatgggcagacgcccttctacg

SEQ ID NO: 13129 - DNA, 23 bp, Homo sapiens
tatgggcagacgcccttctacgc

SEQ ID NO: 13130 - DNA, 23 bp, Homo sapiens
atgggcagacgcccttctacgcg

SEQ ID NO: 13131 - DNA, 23 bp, Homo sapiens
tgggcagacgcccttctacgcgg

SEQ ID NO: 13132 - DNA, 23 bp, Homo sapiens
gggcagacgcccttctacgcgga

SEQ ID NO: 13133 - DNA, 23 bp, Homo sapiens
ggcagacgcccttctacgcggat

SEQ ID NO: 13134 - DNA, 23 bp, Homo sapiens
gcagacgcccttctacgcggatt

SEQ ID NO: 13135 - DNA, 23 bp, Homo sapiens
cagacgcccttctacgcggattc

SEQ ID NO: 13136 - DNA, 23 bp, Homo sapiens
agacgcccttctacgcggattcc

SEQ ID NO: 13137 - DNA, 23 bp, Homo sapiens
gacgcccttctacgcggattcca

SEQ ID NO: 13138 - DNA, 23 bp, Homo sapiens
acgcccttctacgcggattccac

SEQ ID NO: 13139 - DNA, 23 bp, Homo sapiens
cgcccttctacgcggattccacg

SEQ ID NO: 13140 - DNA, 23 bp, Homo sapiens
gcccttctacgcggattccacgg

SEQ ID NO: 13141 - DNA, 23 bp, Homo sapiens
cccttctacgcggattccacggc

SEQ ID NO: 13142 - DNA, 23 bp, Homo sapiens
ccttctacgcggattccacggcg

SEQ ID NO: 13143 - DNA, 23 bp, Homo sapiens
cttctacgcggattccacggcgg

SEQ ID NO: 13144 - DNA, 23 bp, Homo sapiens
ttctacgcggattccacggcgga

SEQ ID NO: 13145 - DNA, 23 bp, Homo sapiens
tctacgcggattccacggcggag

SEQ ID NO: 13146 - DNA, 23 bp, Homo sapiens
ctacgcggattccacggcggaga

SEQ ID NO: 13147 - DNA, 23 bp, Homo sapiens
tacgcggattccacggcggagac

SEQ ID NO: 13148 - DNA, 23 bp, Homo sapiens
acgcggattccacggcggagacc

SEQ ID NO: 13149 - DNA, 23 bp, Homo sapiens
cgcggattccacggcggagacct

SEQ ID NO: 13150 - DNA, 23 bp, Homo sapiens
gcggattccacggcggagaccta

SEQ ID NO: 13151 - DNA, 23 bp, Homo sapiens
cggattccacggcggagacctat

SEQ ID NO: 13152 - DNA, 23 bp, Homo sapiens
ggattccacggcggagacctatg

SEQ ID NO: 13153 - DNA, 23 bp, Homo sapiens
gattccacggcggagacctatgg

SEQ ID NO: 13154 - DNA, 23 bp, Homo sapiens
attccacggcggagacctatggc

SEQ ID NO: 13155 - DNA, 23 bp, Homo sapiens
ttccacggcggagacctatggca

SEQ ID NO: 13156 - DNA, 23 bp, Homo sapiens
tccacggcggagacctatggcaa

SEQ ID NO: 13157 - DNA, 23 bp, Homo sapiens
ccacggcggagacctatggcaag

SEQ ID NO: 13158 - DNA, 23 bp, Homo sapiens
cacggcggagacctatggcaaga

SEQ ID NO: 13159 - DNA, 23 bp, Homo sapiens
acggcggagacctatggcaagat

SEQ ID NO: 13160 - DNA, 23 bp, Homo sapiens
cggcggagacctatggcaagatc

SEQ ID NO: 13161 - DNA, 23 bp, Homo sapiens
ggcggagacctatggcaagatcg

SEQ ID NO: 13162 - DNA, 23 bp, Homo sapiens
gcggagacctatggcaagatcgt

SEQ ID NO: 13163 - DNA, 23 bp, Homo sapiens
cggagacctatggcaagatcgtc

SEQ ID NO: 13164 - DNA, 23 bp, Homo sapiens
ggagacctatggcaagatcgtcc

SEQ ID NO: 13165 - DNA, 23 bp, Homo sapiens
gagacctatggcaagatcgtcca

SEQ ID NO: 13166 - DNA, 23 bp, Homo sapiens
agacctatggcaagatcgtccac

SEQ ID NO: 13167 - DNA, 23 bp, Homo sapiens
gacctatggcaagatcgtccact

SEQ ID NO: 13168 - DNA, 23 bp, Homo sapiens
acctatggcaagatcgtccacta

SEQ ID NO: 13169 - DNA, 23 bp, Homo sapiens
cctatggcaagatcgtccactac

SEQ ID NO: 13170 - DNA, 23 bp, Homo sapiens
ctatggcaagatcgtccactaca

SEQ ID NO: 13171 - DNA, 23 bp, Homo sapiens
tatggcaagatcgtccactacaa

SEQ ID NO: 13172 - DNA, 23 bp, Homo sapiens
atggcaagatcgtccactacaag

SEQ ID NO: 13173 - DNA, 23 bp, Homo sapiens
tggcaagatcgtccactacaagg

SEQ ID NO: 13174 - DNA, 23 bp, Homo sapiens
ggcaagatcgtccactacaagga

SEQ ID NO: 13175 - DNA, 23 bp, Homo sapiens
gcaagatcgtccactacaaggag

SEQ ID NO: 13176 - DNA, 23 bp, Homo sapiens
caagatcgtccactacaaggagc

SEQ ID NO: 13177 - DNA, 23 bp, Homo sapiens
aagatcgtccactacaaggagca

SEQ ID NO: 13178 - DNA, 23 bp, Homo sapiens
agatcgtccactacaaggagcac

SEQ ID NO: 13179 - DNA, 23 bp, Homo sapiens
gatcgtccactacaaggagcacc

SEQ ID NO: 13180 - DNA, 23 bp, Homo sapiens
atcgtccactacaaggagcacct

SEQ ID NO: 13181 - DNA, 23 bp, Homo sapiens
tcgtccactacaaggagcacctc

SEQ ID NO: 13182 - DNA, 23 bp, Homo sapiens
cgtccactacaaggagcacctct

SEQ ID NO: 13183 - DNA, 23 bp, Homo sapiens
gtccactacaaggagcacctctc

SEQ ID NO: 13184 - DNA, 23 bp, Homo sapiens
tccactacaaggagcacctctct

SEQ ID NO: 13185 - DNA, 23 bp, Homo sapiens
ccactacaaggagcacctctctc

SEQ ID NO: 13186 - DNA, 23 bp, Homo sapiens
cactacaaggagcacctctctct

SEQ ID NO: 13187 - DNA, 23 bp, Homo sapiens
actacaaggagcacctctctctg

SEQ ID NO: 13188 - DNA, 23 bp, Homo sapiens
ctacaaggagcacctctctctgc

SEQ ID NO: 13189 - DNA, 23 bp, Homo sapiens
tacaaggagcacctctctctgcc

SEQ ID NO: 13190 - DNA, 23 bp, Homo sapiens
acaaggagcacctctctctgccg

SEQ ID NO: 13191 - DNA, 23 bp, Homo sapiens
caaggagcacctctctctgccgc

SEQ ID NO: 13192 - DNA, 23 bp, Homo sapiens
aaggagcacctctctctgccgct

SEQ ID NO: 13193 - DNA, 23 bp, Homo sapiens
aggagcacctctctctgccgctg

SEQ ID NO: 13194 - DNA, 23 bp, Homo sapiens
ggagcacctctctctgccgctgg

SEQ ID NO: 13195 - DNA, 23 bp, Homo sapiens
gagcacctctctctgccgctggt

SEQ ID NO: 13196 - DNA, 23 bp, Homo sapiens
agcacctctctctgccgctggtg

SEQ ID NO: 13197 - DNA, 23 bp, Homo sapiens
gcacctctctctgccgctggtgg

SEQ ID NO: 13198 - DNA, 23 bp, Homo sapiens
cacctctctctgccgctggtgga

SEQ ID NO: 13199 - DNA, 23 bp, Homo sapiens
acctctctctgccgctggtggac

SEQ ID NO: 13200 - DNA, 23 bp, Homo sapiens
cctctctctgccgctggtggacg

SEQ ID NO: 13201 - DNA, 23 bp, Homo sapiens
ctctctctgccgctggtggacga

SEQ ID NO: 13202 - DNA, 23 bp, Homo sapiens
tctctctgccgctggtggacgaa

SEQ ID NO: 13203 - DNA, 23 bp, Homo sapiens
ctctctgccgctggtggacgaag

SEQ ID NO: 13204 - DNA, 23 bp, Homo sapiens
tctctgccgctggtggacgaagg

SEQ ID NO: 13205 - DNA, 23 bp, Homo sapiens
ctctgccgctggtggacgaaggg

SEQ ID NO: 13206 - DNA, 23 bp, Homo sapiens
tctgccgctggtggacgaagggg

SEQ ID NO: 13207 - DNA, 23 bp, Homo sapiens
ctgccgctggtggacgaaggggt

SEQ ID NO: 13208 - DNA, 23 bp, Homo sapiens
tgccgctggtggacgaaggggtc

SEQ ID NO: 13209 - DNA, 23 bp, Homo sapiens
gccgctggtggacgaaggggtcc

SEQ ID NO: 13210 - DNA, 23 bp, Homo sapiens
ccgctggtggacgaaggggtccc

SEQ ID NO: 13211 - DNA, 23 bp, Homo sapiens
cgctggtggacgaaggggtccct

SEQ ID NO: 13212 - DNA, 23 bp, Homo sapiens
gctggtggacgaaggggtccctg

SEQ ID NO: 13213 - DNA, 23 bp, Homo sapiens
ctggtggacgaaggggtccctga

SEQ ID NO: 13214 - DNA, 23 bp, Homo sapiens
tggtggacgaaggggtccctgag

SEQ ID NO: 13215 - DNA, 23 bp, Homo sapiens
ggtggacgaaggggtccctgagg

SEQ ID NO: 13216 - DNA, 23 bp, Homo sapiens
gtggacgaaggggtccctgagga

SEQ ID NO: 13217 - DNA, 23 bp, Homo sapiens
tggacgaaggggtccctgaggag

SEQ ID NO: 13218 - DNA, 23 bp, Homo sapiens
ggacgaaggggtccctgaggagg

SEQ ID NO: 13219 - DNA, 23 bp, Homo sapiens
gacgaaggggtccctgaggaggc

SEQ ID NO: 13220 - DNA, 23 bp, Homo sapiens
acgaaggggtccctgaggaggct

SEQ ID NO: 13221 - DNA, 23 bp, Homo sapiens
cgaaggggtccctgaggaggctc

SEQ ID NO: 13222 - DNA, 23 bp, Homo sapiens
gaaggggtccctgaggaggctcg

SEQ ID NO: 13223 - DNA, 23 bp, Homo sapiens
aaggggtccctgaggaggctcga

SEQ ID NO: 13224 - DNA, 23 bp, Homo sapiens
aggggtccctgaggaggctcgag

SEQ ID NO: 13225 - DNA, 23 bp, Homo sapiens
ggggtccctgaggaggctcgaga

SEQ ID NO: 13226 - DNA, 23 bp, Homo sapiens
gggtccctgaggaggctcgagac

SEQ ID NO: 13227 - DNA, 23 bp, Homo sapiens
ggtccctgaggaggctcgagact

SEQ ID NO: 13228 - DNA, 23 bp, Homo sapiens
gtccctgaggaggctcgagactt

SEQ ID NO: 13229 - DNA, 23 bp, Homo sapiens
tccctgaggaggctcgagacttc

SEQ ID NO: 13230 - DNA, 23 bp, Homo sapiens
ccctgaggaggctcgagacttca

SEQ ID NO: 13231 - DNA, 23 bp, Homo sapiens
cctgaggaggctcgagacttcat

SEQ ID NO: 13232 - DNA, 23 bp, Homo sapiens
ctgaggaggctcgagacttcatt

SEQ ID NO: 13233 - DNA, 23 bp, Homo sapiens
tgaggaggctcgagacttcattc

SEQ ID NO: 13234 - DNA, 23 bp, Homo sapiens
gaggaggctcgagacttcattca

SEQ ID NO: 13235 - DNA, 23 bp, Homo sapiens
aggaggctcgagacttcattcag

SEQ ID NO: 13236 - DNA, 23 bp, Homo sapiens
ggaggctcgagacttcattcagc

SEQ ID NO: 13237 - DNA, 23 bp, Homo sapiens
gaggctcgagacttcattcagcg

SEQ ID NO: 13238 - DNA, 23 bp, Homo sapiens
aggctcgagacttcattcagcgg

SEQ ID NO: 13239 - DNA, 23 bp, Homo sapiens
ggctcgagacttcattcagcggt

SEQ ID NO: 13240 - DNA, 23 bp, Homo sapiens
gctcgagacttcattcagcggtt

SEQ ID NO: 13241 - DNA, 23 bp, Homo sapiens
ctcgagacttcattcagcggttg

SEQ ID NO: 13242 - DNA, 23 bp, Homo sapiens
tcgagacttcattcagcggttgc

SEQ ID NO: 13243 - DNA, 23 bp, Homo sapiens
cgagacttcattcagcggttgct

SEQ ID NO: 13244 - DNA, 23 bp, Homo sapiens
gagacttcattcagcggttgctg

SEQ ID NO: 13245 - DNA, 23 bp, Homo sapiens
agacttcattcagcggttgctgt

SEQ ID NO: 13246 - DNA, 23 bp, Homo sapiens
gacttcattcagcggttgctgtg

SEQ ID NO: 13247 - DNA, 23 bp, Homo sapiens
acttcattcagcggttgctgtgt

SEQ ID NO: 13248 - DNA, 23 bp, Homo sapiens
cttcattcagcggttgctgtgtc

SEQ ID NO: 13249 - DNA, 23 bp, Homo sapiens
ttcattcagcggttgctgtgtcc

SEQ ID NO: 13250 - DNA, 23 bp, Homo sapiens
tcattcagcggttgctgtgtccc

SEQ ID NO: 13251 - DNA, 23 bp, Homo sapiens
cattcagcggttgctgtgtcccc

SEQ ID NO: 13252 - DNA, 23 bp, Homo sapiens
attcagcggttgctgtgtccccc

SEQ ID NO: 13253 - DNA, 23 bp, Homo sapiens
ttcagcggttgctgtgtcccccg

SEQ ID NO: 13254 - DNA, 23 bp, Homo sapiens
tcagcggttgctgtgtcccccgg

SEQ ID NO: 13255 - DNA, 23 bp, Homo sapiens
cagcggttgctgtgtcccccgga

SEQ ID NO: 13256 - DNA, 23 bp, Homo sapiens
agcggttgctgtgtcccccggag

SEQ ID NO: 13257 - DNA, 23 bp, Homo sapiens
gcggttgctgtgtcccccggaga

SEQ ID NO: 13258 - DNA, 23 bp, Homo sapiens
cggttgctgtgtcccccggagac

SEQ ID NO: 13259 - DNA, 23 bp, Homo sapiens
ggttgctgtgtcccccggagaca

SEQ ID NO: 13260 - DNA, 23 bp, Homo sapiens
gttgctgtgtcccccggagacac

SEQ ID NO: 13261 - DNA, 23 bp, Homo sapiens
ttgctgtgtcccccggagacacg

SEQ ID NO: 13262 - DNA, 23 bp, Homo sapiens
tgctgtgtcccccggagacacgg

SEQ ID NO: 13263 - DNA, 23 bp, Homo sapiens
gctgtgtcccccggagacacggc

SEQ ID NO: 13264 - DNA, 23 bp, Homo sapiens
ctgtgtcccccggagacacggct

SEQ ID NO: 13265 - DNA, 23 bp, Homo sapiens
tgtgtcccccggagacacggctg

SEQ ID NO: 13266 - DNA, 23 bp, Homo sapiens
gtgtcccccggagacacggctgg

SEQ ID NO: 13267 - DNA, 23 bp, Homo sapiens
tgtcccccggagacacggctggg

SEQ ID NO: 13268 - DNA, 23 bp, Homo sapiens
gtcccccggagacacggctgggc

SEQ ID NO: 13269 - DNA, 23 bp, Homo sapiens
tcccccggagacacggctgggcc

SEQ ID NO: 13270 - DNA, 23 bp, Homo sapiens
cccccggagacacggctgggccg

SEQ ID NO: 13271 - DNA, 23 bp, Homo sapiens
ccccggagacacggctgggccgg

SEQ ID NO: 13272 - DNA, 23 bp, Homo sapiens
cccggagacacggctgggccggg

SEQ ID NO: 13273 - DNA, 23 bp, Homo sapiens
ccggagacacggctgggccgggg

SEQ ID NO: 13274 - DNA, 23 bp, Homo sapiens
cggagacacggctgggccggggt

SEQ ID NO: 13275 - DNA, 23 bp, Homo sapiens
ggagacacggctgggccggggtg

SEQ ID NO: 13276 - DNA, 23 bp, Homo sapiens
gagacacggctgggccggggtgg

SEQ ID NO: 13277 - DNA, 23 bp, Homo sapiens
agacacggctgggccggggtgga

SEQ ID NO: 13278 - DNA, 23 bp, Homo sapiens
gacacggctgggccggggtggag

SEQ ID NO: 13279 - DNA, 23 bp, Homo sapiens
acacggctgggccggggtggagc

SEQ ID NO: 13280 - DNA, 23 bp, Homo sapiens
cacggctgggccggggtggagca

SEQ ID NO: 13281 - DNA, 23 bp, Homo sapiens
acggctgggccggggtggagcag

SEQ ID NO: 13282 - DNA, 23 bp, Homo sapiens
cggctgggccggggtggagcagg

SEQ ID NO: 13283 - DNA, 23 bp, Homo sapiens
ggctgggccggggtggagcaggc

SEQ ID NO: 13284 - DNA, 23 bp, Homo sapiens
gctgggccggggtggagcaggcg

SEQ ID NO: 13285 - DNA, 23 bp, Homo sapiens
ctgggccggggtggagcaggcga

SEQ ID NO: 13286 - DNA, 23 bp, Homo sapiens
tgggccggggtggagcaggcgac

SEQ ID NO: 13287 - DNA, 23 bp, Homo sapiens
gggccggggtggagcaggcgact

SEQ ID NO: 13288 - DNA, 23 bp, Homo sapiens
ggccggggtggagcaggcgactt

SEQ ID NO: 13289 - DNA, 23 bp, Homo sapiens
gccggggtggagcaggcgacttc

SEQ ID NO: 13290 - DNA, 23 bp, Homo sapiens
ccggggtggagcaggcgacttcc

SEQ ID NO: 13291 - DNA, 23 bp, Homo sapiens
cggggtggagcaggcgacttccg

SEQ ID NO: 13292 - DNA, 23 bp, Homo sapiens
ggggtggagcaggcgacttccgg

SEQ ID NO: 13293 - DNA, 23 bp, Homo sapiens
gggtggagcaggcgacttccgga

SEQ ID NO: 13294 - DNA, 23 bp, Homo sapiens
ggtggagcaggcgacttccggac

SEQ ID NO: 13295 - DNA, 23 bp, Homo sapiens
gtggagcaggcgacttccggaca

SEQ ID NO: 13296 - DNA, 23 bp, Homo sapiens
tggagcaggcgacttccggacac

SEQ ID NO: 13297 - DNA, 23 bp, Homo sapiens
ggagcaggcgacttccggacaca

SEQ ID NO: 13298 - DNA, 23 bp, Homo sapiens
gagcaggcgacttccggacacat

SEQ ID NO: 13299 - DNA, 23 bp, Homo sapiens
agcaggcgacttccggacacatc

SEQ ID NO: 13300 - DNA, 23 bp, Homo sapiens
gcaggcgacttccggacacatcc

SEQ ID NO: 13301 - DNA, 23 bp, Homo sapiens
caggcgacttccggacacatccc

SEQ ID NO: 13302 - DNA, 23 bp, Homo sapiens
aggcgacttccggacacatccct

SEQ ID NO: 13303 - DNA, 23 bp, Homo sapiens
ggcgacttccggacacatccctt

SEQ ID NO: 13304 - DNA, 23 bp, Homo sapiens
gcgacttccggacacatcccttc

SEQ ID NO: 13305 - DNA, 23 bp, Homo sapiens
cgacttccggacacatcccttct

SEQ ID NO: 13306 - DNA, 23 bp, Homo sapiens
gacttccggacacatcccttctt

SEQ ID NO: 13307 - DNA, 23 bp, Homo sapiens
acttccggacacatcccttcttc

SEQ ID NO: 13308 - DNA, 23 bp, Homo sapiens
cttccggacacatcccttcttct

SEQ ID NO: 13309 - DNA, 23 bp, Homo sapiens
ttccggacacatcccttcttctt

SEQ ID NO: 13310 - DNA, 23 bp, Homo sapiens
tccggacacatcccttcttcttt

SEQ ID NO: 13311 - DNA, 23 bp, Homo sapiens
ccggacacatcccttcttctttg

SEQ ID NO: 13312 - DNA, 23 bp, Homo sapiens
cggacacatcccttcttctttgg

SEQ ID NO: 13313 - DNA, 23 bp, Homo sapiens
ggacacatcccttcttctttggc

SEQ ID NO: 13314 - DNA, 23 bp, Homo sapiens
gacacatcccttcttctttggcc

SEQ ID NO: 13315 - DNA, 23 bp, Homo sapiens
acacatcccttcttctttggcct

SEQ ID NO: 13316 - DNA, 23 bp, Homo sapiens
cacatcccttcttctttggcctc

SEQ ID NO: 13317 - DNA, 23 bp, Homo sapiens
acatcccttcttctttggcctcg

SEQ ID NO: 13318 - DNA, 23 bp, Homo sapiens
catcccttcttctttggcctcga

SEQ ID NO: 13319 - DNA, 23 bp, Homo sapiens
atcccttcttctttggcctcgac

SEQ ID NO: 13320 - DNA, 23 bp, Homo sapiens
tcccttcttctttggcctcgact

SEQ ID NO: 13321 - DNA, 23 bp, Homo sapiens
cccttcttctttggcctcgactg

SEQ ID NO: 13322 - DNA, 23 bp, Homo sapiens
ccttcttctttggcctcgactgg

SEQ ID NO: 13323 - DNA, 23 bp, Homo sapiens
cttcttctttggcctcgactggg

SEQ ID NO: 13324 - DNA, 23 bp, Homo sapiens
ttcttctttggcctcgactggga

SEQ ID NO: 13325 - DNA, 23 bp, Homo sapiens
tcttctttggcctcgactgggat

SEQ ID NO: 13326 - DNA, 23 bp, Homo sapiens
cttctttggcctcgactgggatg

SEQ ID NO: 13327 - DNA, 23 bp, Homo sapiens
ttctttggcctcgactgggatgg

SEQ ID NO: 13328 - DNA, 23 bp, Homo sapiens
tctttggcctcgactgggatggt

SEQ ID NO: 13329 - DNA, 23 bp, Homo sapiens
ctttggcctcgactgggatggtc

SEQ ID NO: 13330 - DNA, 23 bp, Homo sapiens
tttggcctcgactgggatggtct

SEQ ID NO: 13331 - DNA, 23 bp, Homo sapiens
ttggcctcgactgggatggtctc

SEQ ID NO: 13332 - DNA, 23 bp, Homo sapiens
tggcctcgactgggatggtctcc

SEQ ID NO: 13333 - DNA, 23 bp, Homo sapiens
ggcctcgactgggatggtctccg

SEQ ID NO: 13334 - DNA, 23 bp, Homo sapiens
gcctcgactgggatggtctccgg

SEQ ID NO: 13335 - DNA, 23 bp, Homo sapiens
cctcgactgggatggtctccggg

SEQ ID NO: 13336 - DNA, 23 bp, Homo sapiens
ctcgactgggatggtctccggga

SEQ ID NO: 13337 - DNA, 23 bp, Homo sapiens
tcgactgggatggtctccgggac

SEQ ID NO: 13338 - DNA, 23 bp, Homo sapiens
cgactgggatggtctccgggaca

SEQ ID NO: 13339 - DNA, 23 bp, Homo sapiens
gactgggatggtctccgggacag

SEQ ID NO: 13340 - DNA, 23 bp, Homo sapiens
actgggatggtctccgggacagc

SEQ ID NO: 13341 - DNA, 23 bp, Homo sapiens
ctgggatggtctccgggacagcg

SEQ ID NO: 13342 - DNA, 23 bp, Homo sapiens
tgggatggtctccgggacagcgt

SEQ ID NO: 13343 - DNA, 23 bp, Homo sapiens
gggatggtctccgggacagcgtg

SEQ ID NO: 13344 - DNA, 23 bp, Homo sapiens
ggatggtctccgggacagcgtgc

SEQ ID NO: 13345 - DNA, 23 bp, Homo sapiens
gatggtctccgggacagcgtgcc

SEQ ID NO: 13346 - DNA, 23 bp, Homo sapiens
atggtctccgggacagcgtgccc

SEQ ID NO: 13347 - DNA, 23 bp, Homo sapiens
tggtctccgggacagcgtgcccc

SEQ ID NO: 13348 - DNA, 23 bp, Homo sapiens
ggtctccgggacagcgtgccccc

SEQ ID NO: 13349 - DNA, 23 bp, Homo sapiens
gtctccgggacagcgtgcccccc

SEQ ID NO: 13350 - DNA, 23 bp, Homo sapiens
tctccgggacagcgtgcccccct

SEQ ID NO: 13351 - DNA, 23 bp, Homo sapiens
ctccgggacagcgtgcccccctt

SEQ ID NO: 13352 - DNA, 23 bp, Homo sapiens
tccgggacagcgtgccccccttt

SEQ ID NO: 13353 - DNA, 23 bp, Homo sapiens
ccgggacagcgtgccccccttta

SEQ ID NO: 13354 - DNA, 23 bp, Homo sapiens
cgggacagcgtgcccccctttac

SEQ ID NO: 13355 - DNA, 23 bp, Homo sapiens
gggacagcgtgcccccctttaca

SEQ ID NO: 13356 - DNA, 23 bp, Homo sapiens
ggacagcgtgcccccctttacac

SEQ ID NO: 13357 - DNA, 23 bp, Homo sapiens
gacagcgtgcccccctttacacc

SEQ ID NO: 13358 - DNA, 23 bp, Homo sapiens
acagcgtgcccccctttacaccg

SEQ ID NO: 13359 - DNA, 23 bp, Homo sapiens
cagcgtgcccccctttacaccgg

SEQ ID NO: 13360 - DNA, 23 bp, Homo sapiens
agcgtgcccccctttacaccgga

SEQ ID NO: 13361 - DNA, 23 bp, Homo sapiens
gcgtgcccccctttacaccggat

SEQ ID NO: 13362 - DNA, 23 bp, Homo sapiens
cgtgcccccctttacaccggatt

SEQ ID NO: 13363 - DNA, 23 bp, Homo sapiens
gtgcccccctttacaccggattt

SEQ ID NO: 13364 - DNA, 23 bp, Homo sapiens
tgcccccctttacaccggatttc

SEQ ID NO: 13365 - DNA, 23 bp, Homo sapiens
gcccccctttacaccggatttcg

SEQ ID NO: 13366 - DNA, 23 bp, Homo sapiens
cccccctttacaccggatttcga

SEQ ID NO: 13367 - DNA, 23 bp, Homo sapiens
ccccctttacaccggatttcgaa

SEQ ID NO: 13368 - DNA, 23 bp, Homo sapiens
cccctttacaccggatttcgaag

SEQ ID NO: 13369 - DNA, 23 bp, Homo sapiens
ccctttacaccggatttcgaagg

SEQ ID NO: 13370 - DNA, 23 bp, Homo sapiens
cctttacaccggatttcgaaggt

SEQ ID NO: 13371 - DNA, 23 bp, Homo sapiens
ctttacaccggatttcgaaggtg

SEQ ID NO: 13372 - DNA, 23 bp, Homo sapiens
tttacaccggatttcgaaggtgc

SEQ ID NO: 13373 - DNA, 23 bp, Homo sapiens
ttacaccggatttcgaaggtgcc

SEQ ID NO: 13374 - DNA, 23 bp, Homo sapiens
tacaccggatttcgaaggtgcca

SEQ ID NO: 13375 - DNA, 23 bp, Homo sapiens
acaccggatttcgaaggtgccac

SEQ ID NO: 13376 - DNA, 23 bp, Homo sapiens
caccggatttcgaaggtgccacc

SEQ ID NO: 13377 - DNA, 23 bp, Homo sapiens
accggatttcgaaggtgccaccg

SEQ ID NO: 13378 - DNA, 23 bp, Homo sapiens
ccggatttcgaaggtgccaccga

SEQ ID NO: 13379 - DNA, 23 bp, Homo sapiens
cggatttcgaaggtgccaccgac

SEQ ID NO: 13380 - DNA, 23 bp, Homo sapiens
ggatttcgaaggtgccaccgaca

SEQ ID NO: 13381 - DNA, 23 bp, Homo sapiens
gatttcgaaggtgccaccgacac

SEQ ID NO: 13382 - DNA, 23 bp, Homo sapiens
atttcgaaggtgccaccgacaca

SEQ ID NO: 13383 - DNA, 23 bp, Homo sapiens
tttcgaaggtgccaccgacacat

SEQ ID NO: 13384 - DNA, 23 bp, Homo sapiens
ttcgaaggtgccaccgacacatg

SEQ ID NO: 13385 - DNA, 23 bp, Homo sapiens
tcgaaggtgccaccgacacatgc

SEQ ID NO: 13386 - DNA, 23 bp, Homo sapiens
cgaaggtgccaccgacacatgca

SEQ ID NO: 13387 - DNA, 23 bp, Homo sapiens
gaaggtgccaccgacacatgcaa

SEQ ID NO: 13388 - DNA, 23 bp, Homo sapiens
aaggtgccaccgacacatgcaac

SEQ ID NO: 13389 - DNA, 23 bp, Homo sapiens
aggtgccaccgacacatgcaact

SEQ ID NO: 13390 - DNA, 23 bp, Homo sapiens
ggtgccaccgacacatgcaactt

SEQ ID NO: 13391 - DNA, 23 bp, Homo sapiens
gtgccaccgacacatgcaacttc

SEQ ID NO: 13392 - DNA, 23 bp, Homo sapiens
tgccaccgacacatgcaacttcg

SEQ ID NO: 13393 - DNA, 23 bp, Homo sapiens
gccaccgacacatgcaacttcga

SEQ ID NO: 13394 - DNA, 23 bp, Homo sapiens
ccaccgacacatgcaacttcgac

SEQ ID NO: 13395 - DNA, 23 bp, Homo sapiens
caccgacacatgcaacttcgact

SEQ ID NO: 13396 - DNA, 23 bp, Homo sapiens
accgacacatgcaacttcgactt

SEQ ID NO: 13397 - DNA, 23 bp, Homo sapiens
ccgacacatgcaacttcgacttg

SEQ ID NO: 13398 - DNA, 23 bp, Homo sapiens
cgacacatgcaacttcgacttgg

SEQ ID NO: 13399 - DNA, 23 bp, Homo sapiens
gacacatgcaacttcgacttggt

SEQ ID NO: 13400 - DNA, 23 bp, Homo sapiens
acacatgcaacttcgacttggtg

SEQ ID NO: 13401 - DNA, 23 bp, Homo sapiens
cacatgcaacttcgacttggtgg

SEQ ID NO: 13402 - DNA, 23 bp, Homo sapiens
acatgcaacttcgacttggtgga

SEQ ID NO: 13403 - DNA, 23 bp, Homo sapiens
catgcaacttcgacttggtggag

SEQ ID NO: 13404 - DNA, 23 bp, Homo sapiens
atgcaacttcgacttggtggagg

SEQ ID NO: 13405 - DNA, 23 bp, Homo sapiens
tgcaacttcgacttggtggagga

SEQ ID NO: 13406 - DNA, 23 bp, Homo sapiens
gcaacttcgacttggtggaggac

SEQ ID NO: 13407 - DNA, 23 bp, Homo sapiens
caacttcgacttggtggaggacg

SEQ ID NO: 13408 - DNA, 23 bp, Homo sapiens
aacttcgacttggtggaggacgg

SEQ ID NO: 13409 - DNA, 23 bp, Homo sapiens
acttcgacttggtggaggacggg

SEQ ID NO: 13410 - DNA, 23 bp, Homo sapiens
cttcgacttggtggaggacgggc

SEQ ID NO: 13411 - DNA, 23 bp, Homo sapiens
ttcgacttggtggaggacgggct

SEQ ID NO: 13412 - DNA, 23 bp, Homo sapiens
tcgacttggtggaggacgggctc

SEQ ID NO: 13413 - DNA, 23 bp, Homo sapiens
cgacttggtggaggacgggctca

SEQ ID NO: 13414 - DNA, 23 bp, Homo sapiens
gacttggtggaggacgggctcac

SEQ ID NO: 13415 - DNA, 23 bp, Homo sapiens
acttggtggaggacgggctcact

SEQ ID NO: 13416 - DNA, 23 bp, Homo sapiens
cttggtggaggacgggctcactg

SEQ ID NO: 13417 - DNA, 23 bp, Homo sapiens
ttggtggaggacgggctcactgc

SEQ ID NO: 13418 - DNA, 23 bp, Homo sapiens
tggtggaggacgggctcactgcc

SEQ ID NO: 13419 - DNA, 23 bp, Homo sapiens
ggtggaggacgggctcactgcca

SEQ ID NO: 13420 - DNA, 23 bp, Homo sapiens
gtggaggacgggctcactgccat

SEQ ID NO: 13421 - DNA, 23 bp, Homo sapiens
tggaggacgggctcactgccatg

SEQ ID NO: 13422 - DNA, 23 bp, Homo sapiens
ggaggacgggctcactgccatgg

SEQ ID NO: 13423 - DNA, 23 bp, Homo sapiens
gaggacgggctcactgccatgga

SEQ ID NO: 13424 - DNA, 23 bp, Homo sapiens
aggacgggctcactgccatggag

SEQ ID NO: 13425 - DNA, 23 bp, Homo sapiens
ggacgggctcactgccatggaga

SEQ ID NO: 13426 - DNA, 23 bp, Homo sapiens
gacgggctcactgccatggagac

SEQ ID NO: 13427 - DNA, 23 bp, Homo sapiens
acgggctcactgccatggagaca

SEQ ID NO: 13428 - DNA, 23 bp, Homo sapiens
cgggctcactgccatggagacac

SEQ ID NO: 13429 - DNA, 23 bp, Homo sapiens
gggctcactgccatggagacact

SEQ ID NO: 13430 - DNA, 23 bp, Homo sapiens
ggctcactgccatggagacactg

SEQ ID NO: 13431 - DNA, 23 bp, Homo sapiens
gctcactgccatggagacactgt

SEQ ID NO: 13432 - DNA, 23 bp, Homo sapiens
ctcactgccatggagacactgtc

SEQ ID NO: 13433 - DNA, 23 bp, Homo sapiens
tcactgccatggagacactgtcg

SEQ ID NO: 13434 - DNA, 23 bp, Homo sapiens
cactgccatggagacactgtcgg

SEQ ID NO: 13435 - DNA, 23 bp, Homo sapiens
actgccatggagacactgtcgga

SEQ ID NO: 13436 - DNA, 23 bp, Homo sapiens
ctgccatggagacactgtcggac

SEQ ID NO: 13437 - DNA, 23 bp, Homo sapiens
tgccatggagacactgtcggaca

SEQ ID NO: 13438 - DNA, 23 bp, Homo sapiens
gccatggagacactgtcggacat

SEQ ID NO: 13439 - DNA, 23 bp, Homo sapiens
ccatggagacactgtcggacatt

SEQ ID NO: 13440 - DNA, 23 bp, Homo sapiens
catggagacactgtcggacattc

SEQ ID NO: 13441 - DNA, 23 bp, Homo sapiens
atggagacactgtcggacattcg

SEQ ID NO: 13442 - DNA, 23 bp, Homo sapiens
tggagacactgtcggacattcgg

SEQ ID NO: 13443 - DNA, 23 bp, Homo sapiens
ggagacactgtcggacattcggg

SEQ ID NO: 13444 - DNA, 23 bp, Homo sapiens
gagacactgtcggacattcggga

SEQ ID NO: 13445 - DNA, 23 bp, Homo sapiens
agacactgtcggacattcgggaa

SEQ ID NO: 13446 - DNA, 23 bp, Homo sapiens
gacactgtcggacattcgggaag

SEQ ID NO: 13447 - DNA, 23 bp, Homo sapiens
acactgtcggacattcgggaagg

SEQ ID NO: 13448 - DNA, 23 bp, Homo sapiens
cactgtcggacattcgggaaggt

SEQ ID NO: 13449 - DNA, 23 bp, Homo sapiens
actgtcggacattcgggaaggtg

SEQ ID NO: 13450 - DNA, 23 bp, Homo sapiens
ctgtcggacattcgggaaggtgc

SEQ ID NO: 13451 - DNA, 23 bp, Homo sapiens
tgtcggacattcgggaaggtgcg

SEQ ID NO: 13452 - DNA, 23 bp, Homo sapiens
gtcggacattcgggaaggtgcgc

SEQ ID NO: 13453 - DNA, 23 bp, Homo sapiens
tcggacattcgggaaggtgcgcc

SEQ ID NO: 13454 - DNA, 23 bp, Homo sapiens
cggacattcgggaaggtgcgccg

SEQ ID NO: 13455 - DNA, 23 bp, Homo sapiens
ggacattcgggaaggtgcgccgc

SEQ ID NO: 13456 - DNA, 23 bp, Homo sapiens
gacattcgggaaggtgcgccgct

SEQ ID NO: 13457 - DNA, 23 bp, Homo sapiens
acattcgggaaggtgcgccgcta

SEQ ID NO: 13458 - DNA, 23 bp, Homo sapiens
cattcgggaaggtgcgccgctag

SEQ ID NO: 13459 - DNA, 23 bp, Homo sapiens
attcgggaaggtgcgccgctagg

SEQ ID NO: 13460 - DNA, 23 bp, Homo sapiens
ttcgggaaggtgcgccgctaggg

SEQ ID NO: 13461 - DNA, 23 bp, Homo sapiens
tcgggaaggtgcgccgctagggg

SEQ ID NO: 13462 - DNA, 23 bp, Homo sapiens
cgggaaggtgcgccgctaggggt

SEQ ID NO: 13463 - DNA, 23 bp, Homo sapiens
gggaaggtgcgccgctaggggtc

SEQ ID NO: 13464 - DNA, 23 bp, Homo sapiens
ggaaggtgcgccgctaggggtcc

SEQ ID NO: 13465 - DNA, 23 bp, Homo sapiens
gaaggtgcgccgctaggggtcca

SEQ ID NO: 13466 - DNA, 23 bp, Homo sapiens
aaggtgcgccgctaggggtccac

SEQ ID NO: 13467 - DNA, 23 bp, Homo sapiens
aggtgcgccgctaggggtccacc

SEQ ID NO: 13468 - DNA, 23 bp, Homo sapiens
ggtgcgccgctaggggtccacct

SEQ ID NO: 13469 - DNA, 23 bp, Homo sapiens
gtgcgccgctaggggtccacctg

SEQ ID NO: 13470 - DNA, 23 bp, Homo sapiens
tgcgccgctaggggtccacctgc

SEQ ID NO: 13471 - DNA, 23 bp, Homo sapiens
gcgccgctaggggtccacctgcc

SEQ ID NO: 13472 - DNA, 23 bp, Homo sapiens
cgccgctaggggtccacctgcct

SEQ ID NO: 13473 - DNA, 23 bp, Homo sapiens
gccgctaggggtccacctgcctt

SEQ ID NO: 13474 - DNA, 23 bp, Homo sapiens
ccgctaggggtccacctgccttt

SEQ ID NO: 13475 - DNA, 23 bp, Homo sapiens
cgctaggggtccacctgcctttt

SEQ ID NO: 13476 - DNA, 23 bp, Homo sapiens
gctaggggtccacctgccttttg

SEQ ID NO: 13477 - DNA, 23 bp, Homo sapiens
ctaggggtccacctgccttttgt

SEQ ID NO: 13478 - DNA, 23 bp, Homo sapiens
taggggtccacctgccttttgtg

SEQ ID NO: 13479 - DNA, 23 bp, Homo sapiens
aggggtccacctgccttttgtgg

SEQ ID NO: 13480 - DNA, 23 bp, Homo sapiens
ggggtccacctgccttttgtggg

SEQ ID NO: 13481 - DNA, 23 bp, Homo sapiens
gggtccacctgccttttgtgggc

SEQ ID NO: 13482 - DNA, 23 bp, Homo sapiens
ggtccacctgccttttgtgggct

SEQ ID NO: 13483 - DNA, 23 bp, Homo sapiens
gtccacctgccttttgtgggcta

SEQ ID NO: 13484 - DNA, 23 bp, Homo sapiens
tccacctgccttttgtgggctac

SEQ ID NO: 13485 - DNA, 23 bp, Homo sapiens
ccacctgccttttgtgggctact

SEQ ID NO: 13486 - DNA, 23 bp, Homo sapiens
cacctgccttttgtgggctactc

SEQ ID NO: 13487 - DNA, 23 bp, Homo sapiens
acctgccttttgtgggctactcc

SEQ ID NO: 13488 - DNA, 23 bp, Homo sapiens
cctgccttttgtgggctactcct

SEQ ID NO: 13489 - DNA, 23 bp, Homo sapiens
ctgccttttgtgggctactccta

SEQ ID NO: 13490 - DNA, 23 bp, Homo sapiens
tgccttttgtgggctactcctac

SEQ ID NO: 13491 - DNA, 23 bp, Homo sapiens
gccttttgtgggctactcctact

SEQ ID NO: 13492 - DNA, 23 bp, Homo sapiens
ccttttgtgggctactcctactc

SEQ ID NO: 13493 - DNA, 23 bp, Homo sapiens
cttttgtgggctactcctactcc

SEQ ID NO: 13494 - DNA, 23 bp, Homo sapiens
ttttgtgggctactcctactcct

SEQ ID NO: 13495 - DNA, 23 bp, Homo sapiens
tttgtgggctactcctactcctg

SEQ ID NO: 13496 - DNA, 23 bp, Homo sapiens
ttgtgggctactcctactcctgc

SEQ ID NO: 13497 - DNA, 23 bp, Homo sapiens
tgtgggctactcctactcctgca

SEQ ID NO: 13498 - DNA, 23 bp, Homo sapiens
gtgggctactcctactcctgcat

SEQ ID NO: 13499 - DNA, 23 bp, Homo sapiens
tgggctactcctactcctgcatg

SEQ ID NO: 13500 - DNA, 23 bp, Homo sapiens
gggctactcctactcctgcatgg

SEQ ID NO: 13501 - DNA, 23 bp, Homo sapiens
ggctactcctactcctgcatggc

SEQ ID NO: 13502 - DNA, 23 bp, Homo sapiens
gctactcctactcctgcatggcc

SEQ ID NO: 13503 - DNA, 23 bp, Homo sapiens
ctactcctactcctgcatggccc

SEQ ID NO: 13504 - DNA, 23 bp, Homo sapiens
tactcctactcctgcatggccct

SEQ ID NO: 13505 - DNA, 23 bp, Homo sapiens
actcctactcctgcatggccctc

SEQ ID NO: 13506 - DNA, 23 bp, Homo sapiens
ctcctactcctgcatggccctca

SEQ ID NO: 13507 - DNA, 23 bp, Homo sapiens
tcctactcctgcatggccctcag

SEQ ID NO: 13508 - DNA, 23 bp, Homo sapiens
cctactcctgcatggccctcagg

SEQ ID NO: 13509 - DNA, 23 bp, Homo sapiens
ctactcctgcatggccctcaggg

SEQ ID NO: 13510 - DNA, 23 bp, Homo sapiens
tactcctgcatggccctcaggga

SEQ ID NO: 13511 - DNA, 23 bp, Homo sapiens
actcctgcatggccctcagggac

SEQ ID NO: 13512 - DNA, 23 bp, Homo sapiens
ctcctgcatggccctcagggaca

SEQ ID NO: 13513 - DNA, 23 bp, Homo sapiens
tcctgcatggccctcagggacag

SEQ ID NO: 13514 - DNA, 23 bp, Homo sapiens
cctgcatggccctcagggacagt

SEQ ID NO: 13515 - DNA, 23 bp, Homo sapiens
ctgcatggccctcagggacagtg

SEQ ID NO: 13516 - DNA, 23 bp, Homo sapiens
tgcatggccctcagggacagtga

SEQ ID NO: 13517 - DNA, 23 bp, Homo sapiens
gcatggccctcagggacagtgag

SEQ ID NO: 13518 - DNA, 23 bp, Homo sapiens
catggccctcagggacagtgagg

SEQ ID NO: 13519 - DNA, 23 bp, Homo sapiens
atggccctcagggacagtgaggt

SEQ ID NO: 13520 - DNA, 23 bp, Homo sapiens
tggccctcagggacagtgaggtc

SEQ ID NO: 13521 - DNA, 23 bp, Homo sapiens
ggccctcagggacagtgaggtcc

SEQ ID NO: 13522 - DNA, 23 bp, Homo sapiens
gccctcagggacagtgaggtccc

SEQ ID NO: 13523 - DNA, 23 bp, Homo sapiens
ccctcagggacagtgaggtccca

SEQ ID NO: 13524 - DNA, 23 bp, Homo sapiens
cctcagggacagtgaggtcccag

SEQ ID NO: 13525 - DNA, 23 bp, Homo sapiens
ctcagggacagtgaggtcccagg

SEQ ID NO: 13526 - DNA, 23 bp, Homo sapiens
tcagggacagtgaggtcccaggc

SEQ ID NO: 13527 - DNA, 23 bp, Homo sapiens
cagggacagtgaggtcccaggcc

SEQ ID NO: 13528 - DNA, 23 bp, Homo sapiens
agggacagtgaggtcccaggccc

SEQ ID NO: 13529 - DNA, 23 bp, Homo sapiens
gggacagtgaggtcccaggcccc

SEQ ID NO: 13530 - DNA, 23 bp, Homo sapiens
ggacagtgaggtcccaggcccca

SEQ ID NO: 13531 - DNA, 23 bp, Homo sapiens
gacagtgaggtcccaggccccac

SEQ ID NO: 13532 - DNA, 23 bp, Homo sapiens
acagtgaggtcccaggccccaca

SEQ ID NO: 13533 - DNA, 23 bp, Homo sapiens
cagtgaggtcccaggccccacac

SEQ ID NO: 13534 - DNA, 23 bp, Homo sapiens
agtgaggtcccaggccccacacc

SEQ ID NO: 13535 - DNA, 23 bp, Homo sapiens
gtgaggtcccaggccccacaccc

SEQ ID NO: 13536 - DNA, 23 bp, Homo sapiens
tgaggtcccaggccccacaccca

SEQ ID NO: 13537 - DNA, 23 bp, Homo sapiens
gaggtcccaggccccacacccat

SEQ ID NO: 13538 - DNA, 23 bp, Homo sapiens
aggtcccaggccccacacccatg

SEQ ID NO: 13539 - DNA, 23 bp, Homo sapiens
ggtcccaggccccacacccatgg

SEQ ID NO: 13540 - DNA, 23 bp, Homo sapiens
gtcccaggccccacacccatgga

SEQ ID NO: 13541 - DNA, 23 bp, Homo sapiens
tcccaggccccacacccatggaa

SEQ ID NO: 13542 - DNA, 23 bp, Homo sapiens
cccaggccccacacccatggaac

SEQ ID NO: 13543 - DNA, 23 bp, Homo sapiens
ccaggccccacacccatggaact

SEQ ID NO: 13544 - DNA, 23 bp, Homo sapiens
caggccccacacccatggaactg

SEQ ID NO: 13545 - DNA, 23 bp, Homo sapiens
aggccccacacccatggaactgg

SEQ ID NO: 13546 - DNA, 23 bp, Homo sapiens
ggccccacacccatggaactgga

SEQ ID NO: 13547 - DNA, 23 bp, Homo sapiens
gccccacacccatggaactggag

SEQ ID NO: 13548 - DNA, 23 bp, Homo sapiens
ccccacacccatggaactggagg

SEQ ID NO: 13549 - DNA, 23 bp, Homo sapiens
cccacacccatggaactggaggc

SEQ ID NO: 13550 - DNA, 23 bp, Homo sapiens
ccacacccatggaactggaggcc

SEQ ID NO: 13551 - DNA, 23 bp, Homo sapiens
cacacccatggaactggaggccg

SEQ ID NO: 13552 - DNA, 23 bp, Homo sapiens
acacccatggaactggaggccga

SEQ ID NO: 13553 - DNA, 23 bp, Homo sapiens
cacccatggaactggaggccgag

SEQ ID NO: 13554 - DNA, 23 bp, Homo sapiens
acccatggaactggaggccgagc

SEQ ID NO: 13555 - DNA, 23 bp, Homo sapiens
cccatggaactggaggccgagca

SEQ ID NO: 13556 - DNA, 23 bp, Homo sapiens
ccatggaactggaggccgagcag

SEQ ID NO: 13557 - DNA, 23 bp, Homo sapiens
catggaactggaggccgagcagc

SEQ ID NO: 13558 - DNA, 23 bp, Homo sapiens
atggaactggaggccgagcagct

SEQ ID NO: 13559 - DNA, 23 bp, Homo sapiens
tggaactggaggccgagcagctg

SEQ ID NO: 13560 - DNA, 23 bp, Homo sapiens
ggaactggaggccgagcagctgc

SEQ ID NO: 13561 - DNA, 23 bp, Homo sapiens
gaactggaggccgagcagctgct

SEQ ID NO: 13562 - DNA, 23 bp, Homo sapiens
aactggaggccgagcagctgctt

SEQ ID NO: 13563 - DNA, 23 bp, Homo sapiens
actggaggccgagcagctgcttg

SEQ ID NO: 13564 - DNA, 23 bp, Homo sapiens
ctggaggccgagcagctgcttga

SEQ ID NO: 13565 - DNA, 23 bp, Homo sapiens
tggaggccgagcagctgcttgag

SEQ ID NO: 13566 - DNA, 23 bp, Homo sapiens
ggaggccgagcagctgcttgagc

SEQ ID NO: 13567 - DNA, 23 bp, Homo sapiens
gaggccgagcagctgcttgagcc

SEQ ID NO: 13568 - DNA, 23 bp, Homo sapiens
aggccgagcagctgcttgagcca

SEQ ID NO: 13569 - DNA, 23 bp, Homo sapiens
ggccgagcagctgcttgagccac

SEQ ID NO: 13570 - DNA, 23 bp, Homo sapiens
gccgagcagctgcttgagccaca

SEQ ID NO: 13571 - DNA, 23 bp, Homo sapiens
ccgagcagctgcttgagccacac

SEQ ID NO: 13572 - DNA, 23 bp, Homo sapiens
cgagcagctgcttgagccacacg

SEQ ID NO: 13573 - DNA, 23 bp, Homo sapiens
gagcagctgcttgagccacacgt

SEQ ID NO: 13574 - DNA, 23 bp, Homo sapiens
agcagctgcttgagccacacgtg

SEQ ID NO: 13575 - DNA, 23 bp, Homo sapiens
gcagctgcttgagccacacgtgc

SEQ ID NO: 13576 - DNA, 23 bp, Homo sapiens
cagctgcttgagccacacgtgca

SEQ ID NO: 13577 - DNA, 23 bp, Homo sapiens
agctgcttgagccacacgtgcaa

SEQ ID NO: 13578 - DNA, 23 bp, Homo sapiens
gctgcttgagccacacgtgcaag

SEQ ID NO: 13579 - DNA, 23 bp, Homo sapiens
ctgcttgagccacacgtgcaagc

SEQ ID NO: 13580 - DNA, 23 bp, Homo sapiens
tgcttgagccacacgtgcaagcg

SEQ ID NO: 13581 - DNA, 23 bp, Homo sapiens
gcttgagccacacgtgcaagcgc

SEQ ID NO: 13582 - DNA, 23 bp, Homo sapiens
cttgagccacacgtgcaagcgcc

SEQ ID NO: 13583 - DNA, 23 bp, Homo sapiens
ttgagccacacgtgcaagcgccc

SEQ ID NO: 13584 - DNA, 23 bp, Homo sapiens
tgagccacacgtgcaagcgccca

SEQ ID NO: 13585 - DNA, 23 bp, Homo sapiens
gagccacacgtgcaagcgcccag

SEQ ID NO: 13586 - DNA, 23 bp, Homo sapiens
agccacacgtgcaagcgcccagc

SEQ ID NO: 13587 - DNA, 23 bp, Homo sapiens
gccacacgtgcaagcgcccagcc

SEQ ID NO: 13588 - DNA, 23 bp, Homo sapiens
ccacacgtgcaagcgcccagcct

SEQ ID NO: 13589 - DNA, 23 bp, Homo sapiens
cacacgtgcaagcgcccagcctg

SEQ ID NO: 13590 - DNA, 23 bp, Homo sapiens
acacgtgcaagcgcccagcctgg

SEQ ID NO: 13591 - DNA, 23 bp, Homo sapiens
cacgtgcaagcgcccagcctgga

SEQ ID NO: 13592 - DNA, 23 bp, Homo sapiens
acgtgcaagcgcccagcctggag

SEQ ID NO: 13593 - DNA, 23 bp, Homo sapiens
cgtgcaagcgcccagcctggagc

SEQ ID NO: 13594 - DNA, 23 bp, Homo sapiens
gtgcaagcgcccagcctggagcc

SEQ ID NO: 13595 - DNA, 23 bp, Homo sapiens
tgcaagcgcccagcctggagccc

SEQ ID NO: 13596 - DNA, 23 bp, Homo sapiens
gcaagcgcccagcctggagccct

SEQ ID NO: 13597 - DNA, 23 bp, Homo sapiens
caagcgcccagcctggagccctc

SEQ ID NO: 13598 - DNA, 23 bp, Homo sapiens
aagcgcccagcctggagccctcg

SEQ ID NO: 13599 - DNA, 23 bp, Homo sapiens
agcgcccagcctggagccctcgg

SEQ ID NO: 13600 - DNA, 23 bp, Homo sapiens
gcgcccagcctggagccctcggt

SEQ ID NO: 13601 - DNA, 23 bp, Homo sapiens
cgcccagcctggagccctcggtg

SEQ ID NO: 13602 - DNA, 23 bp, Homo sapiens
gcccagcctggagccctcggtgt

SEQ ID NO: 13603 - DNA, 23 bp, Homo sapiens
cccagcctggagccctcggtgtc

SEQ ID NO: 13604 - DNA, 23 bp, Homo sapiens
ccagcctggagccctcggtgtcc

SEQ ID NO: 13605 - DNA, 23 bp, Homo sapiens
cagcctggagccctcggtgtccc

SEQ ID NO: 13606 - DNA, 23 bp, Homo sapiens
agcctggagccctcggtgtcccc

SEQ ID NO: 13607 - DNA, 23 bp, Homo sapiens
gcctggagccctcggtgtcccca

SEQ ID NO: 13608 - DNA, 23 bp, Homo sapiens
cctggagccctcggtgtccccac

SEQ ID NO: 13609 - DNA, 23 bp, Homo sapiens
ctggagccctcggtgtccccaca

SEQ ID NO: 13610 - DNA, 23 bp, Homo sapiens
tggagccctcggtgtccccacag

SEQ ID NO: 13611 - DNA, 23 bp, Homo sapiens
ggagccctcggtgtccccacagg

SEQ ID NO: 13612 - DNA, 23 bp, Homo sapiens
gagccctcggtgtccccacagga

SEQ ID NO: 13613 - DNA, 23 bp, Homo sapiens
agccctcggtgtccccacaggat

SEQ ID NO: 13614 - DNA, 23 bp, Homo sapiens
gccctcggtgtccccacaggatg

SEQ ID NO: 13615 - DNA, 23 bp, Homo sapiens
ccctcggtgtccccacaggatga

SEQ ID NO: 13616 - DNA, 23 bp, Homo sapiens
cctcggtgtccccacaggatgaa

SEQ ID NO: 13617 - DNA, 23 bp, Homo sapiens
ctcggtgtccccacaggatgaaa

SEQ ID NO: 13618 - DNA, 23 bp, Homo sapiens
tcggtgtccccacaggatgaaac

SEQ ID NO: 13619 - DNA, 23 bp, Homo sapiens
cggtgtccccacaggatgaaaca

SEQ ID NO: 13620 - DNA, 23 bp, Homo sapiens
ggtgtccccacaggatgaaacag

SEQ ID NO: 13621 - DNA, 23 bp, Homo sapiens
gtgtccccacaggatgaaacagc

SEQ ID NO: 13622 - DNA, 23 bp, Homo sapiens
tgtccccacaggatgaaacagct

SEQ ID NO: 13623 - DNA, 23 bp, Homo sapiens
gtccccacaggatgaaacagctg

SEQ ID NO: 13624 - DNA, 23 bp, Homo sapiens
tccccacaggatgaaacagctga

SEQ ID NO: 13625 - DNA, 23 bp, Homo sapiens
ccccacaggatgaaacagctgaa

SEQ ID NO: 13626 - DNA, 23 bp, Homo sapiens
cccacaggatgaaacagctgaag

SEQ ID NO: 13627 - DNA, 23 bp, Homo sapiens
ccacaggatgaaacagctgaagt

SEQ ID NO: 13628 - DNA, 23 bp, Homo sapiens
cacaggatgaaacagctgaagtg

SEQ ID NO: 13629 - DNA, 23 bp, Homo sapiens
acaggatgaaacagctgaagtgg

SEQ ID NO: 13630 - DNA, 23 bp, Homo sapiens
caggatgaaacagctgaagtggc

SEQ ID NO: 13631 - DNA, 23 bp, Homo sapiens
aggatgaaacagctgaagtggca

SEQ ID NO: 13632 - DNA, 23 bp, Homo sapiens
ggatgaaacagctgaagtggcag

SEQ ID NO: 13633 - DNA, 23 bp, Homo sapiens
gatgaaacagctgaagtggcagt

SEQ ID NO: 13634 - DNA, 23 bp, Homo sapiens
atgaaacagctgaagtggcagtt

SEQ ID NO: 13635 - DNA, 23 bp, Homo sapiens
tgaaacagctgaagtggcagttc

SEQ ID NO: 13636 - DNA, 23 bp, Homo sapiens
gaaacagctgaagtggcagttcc

SEQ ID NO: 13637 - DNA, 23 bp, Homo sapiens
aaacagctgaagtggcagttcca

SEQ ID NO: 13638 - DNA, 23 bp, Homo sapiens
aacagctgaagtggcagttccag

SEQ ID NO: 13639 - DNA, 23 bp, Homo sapiens
acagctgaagtggcagttccagc

SEQ ID NO: 13640 - DNA, 23 bp, Homo sapiens
cagctgaagtggcagttccagcg

SEQ ID NO: 13641 - DNA, 23 bp, Homo sapiens
agctgaagtggcagttccagcgg

SEQ ID NO: 13642 - DNA, 23 bp, Homo sapiens
gctgaagtggcagttccagcggc

SEQ ID NO: 13643 - DNA, 23 bp, Homo sapiens
ctgaagtggcagttccagcggct

SEQ ID NO: 13644 - DNA, 23 bp, Homo sapiens
tgaagtggcagttccagcggctg

SEQ ID NO: 13645 - DNA, 23 bp, Homo sapiens
gaagtggcagttccagcggctgt

SEQ ID NO: 13646 - DNA, 23 bp, Homo sapiens
aagtggcagttccagcggctgtc

SEQ ID NO: 13647 - DNA, 23 bp, Homo sapiens
agtggcagttccagcggctgtcc

SEQ ID NO: 13648 - DNA, 23 bp, Homo sapiens
gtggcagttccagcggctgtccc

SEQ ID NO: 13649 - DNA, 23 bp, Homo sapiens
tggcagttccagcggctgtccct

SEQ ID NO: 13650 - DNA, 23 bp, Homo sapiens
ggcagttccagcggctgtccctg

SEQ ID NO: 13651 - DNA, 23 bp, Homo sapiens
gcagttccagcggctgtccctgc

SEQ ID NO: 13652 - DNA, 23 bp, Homo sapiens
cagttccagcggctgtccctgcg

SEQ ID NO: 13653 - DNA, 23 bp, Homo sapiens
agttccagcggctgtccctgcgg

SEQ ID NO: 13654 - DNA, 23 bp, Homo sapiens
gttccagcggctgtccctgcggc

SEQ ID NO: 13655 - DNA, 23 bp, Homo sapiens
ttccagcggctgtccctgcggca

SEQ ID NO: 13656 - DNA, 23 bp, Homo sapiens
tccagcggctgtccctgcggcag

SEQ ID NO: 13657 - DNA, 23 bp, Homo sapiens
ccagcggctgtccctgcggcaga

SEQ ID NO: 13658 - DNA, 23 bp, Homo sapiens
cagcggctgtccctgcggcagag

SEQ ID NO: 13659 - DNA, 23 bp, Homo sapiens
agcggctgtccctgcggcagagg

SEQ ID NO: 13660 - DNA, 23 bp, Homo sapiens
gcggctgtccctgcggcagaggc

SEQ ID NO: 13661 - DNA, 23 bp, Homo sapiens
cggctgtccctgcggcagaggct

SEQ ID NO: 13662 - DNA, 23 bp, Homo sapiens
ggctgtccctgcggcagaggctg

SEQ ID NO: 13663 - DNA, 23 bp, Homo sapiens
gctgtccctgcggcagaggctga

SEQ ID NO: 13664 - DNA, 23 bp, Homo sapiens
ctgtccctgcggcagaggctgag

SEQ ID NO: 13665 - DNA, 23 bp, Homo sapiens
tgtccctgcggcagaggctgagg

SEQ ID NO: 13666 - DNA, 23 bp, Homo sapiens
gtccctgcggcagaggctgaggc

SEQ ID NO: 13667 - DNA, 23 bp, Homo sapiens
tccctgcggcagaggctgaggcc

SEQ ID NO: 13668 - DNA, 23 bp, Homo sapiens
ccctgcggcagaggctgaggccg

SEQ ID NO: 13669 - DNA, 23 bp, Homo sapiens
cctgcggcagaggctgaggccga

SEQ ID NO: 13670 - DNA, 23 bp, Homo sapiens
ctgcggcagaggctgaggccgag

SEQ ID NO: 13671 - DNA, 23 bp, Homo sapiens
tgcggcagaggctgaggccgagg

SEQ ID NO: 13672 - DNA, 23 bp, Homo sapiens
gcggcagaggctgaggccgaggt

SEQ ID NO: 13673 - DNA, 23 bp, Homo sapiens
cggcagaggctgaggccgaggtg

SEQ ID NO: 13674 - DNA, 23 bp, Homo sapiens
ggcagaggctgaggccgaggtga

SEQ ID NO: 13675 - DNA, 23 bp, Homo sapiens
gcagaggctgaggccgaggtgac

SEQ ID NO: 13676 - DNA, 23 bp, Homo sapiens
cagaggctgaggccgaggtgacg

SEQ ID NO: 13677 - DNA, 23 bp, Homo sapiens
agaggctgaggccgaggtgacgc

SEQ ID NO: 13678 - DNA, 23 bp, Homo sapiens
gaggctgaggccgaggtgacgct

SEQ ID NO: 13679 - DNA, 23 bp, Homo sapiens
aggctgaggccgaggtgacgctg

SEQ ID NO: 13680 - DNA, 23 bp, Homo sapiens
ggctgaggccgaggtgacgctgc

SEQ ID NO: 13681 - DNA, 23 bp, Homo sapiens
gctgaggccgaggtgacgctgcg

SEQ ID NO: 13682 - DNA, 23 bp, Homo sapiens
ctgaggccgaggtgacgctgcgg

SEQ ID NO: 13683 - DNA, 23 bp, Homo sapiens
tgaggccgaggtgacgctgcggg

SEQ ID NO: 13684 - DNA, 23 bp, Homo sapiens
gaggccgaggtgacgctgcggga

SEQ ID NO: 13685 - DNA, 23 bp, Homo sapiens
aggccgaggtgacgctgcgggag

SEQ ID NO: 13686 - DNA, 23 bp, Homo sapiens
ggccgaggtgacgctgcgggagc

SEQ ID NO: 13687 - DNA, 23 bp, Homo sapiens
gccgaggtgacgctgcgggagct

SEQ ID NO: 13688 - DNA, 23 bp, Homo sapiens
ccgaggtgacgctgcgggagctc

SEQ ID NO: 13689 - DNA, 23 bp, Homo sapiens
cgaggtgacgctgcgggagctcc

SEQ ID NO: 13690 - DNA, 23 bp, Homo sapiens
gaggtgacgctgcgggagctcca

SEQ ID NO: 13691 - DNA, 23 bp, Homo sapiens
aggtgacgctgcgggagctccag

SEQ ID NO: 13692 - DNA, 23 bp, Homo sapiens
ggtgacgctgcgggagctccagg

SEQ ID NO: 13693 - DNA, 23 bp, Homo sapiens
gtgacgctgcgggagctccagga

SEQ ID NO: 13694 - DNA, 23 bp, Homo sapiens
tgacgctgcgggagctccaggaa

SEQ ID NO: 13695 - DNA, 23 bp, Homo sapiens
gacgctgcgggagctccaggaag

SEQ ID NO: 13696 - DNA, 23 bp, Homo sapiens
acgctgcgggagctccaggaagc

SEQ ID NO: 13697 - DNA, 23 bp, Homo sapiens
cgctgcgggagctccaggaagcc

SEQ ID NO: 13698 - DNA, 23 bp, Homo sapiens
gctgcgggagctccaggaagccc

SEQ ID NO: 13699 - DNA, 23 bp, Homo sapiens
ctgcgggagctccaggaagccct

SEQ ID NO: 13700 - DNA, 23 bp, Homo sapiens
tgcgggagctccaggaagccctg

SEQ ID NO: 13701 - DNA, 23 bp, Homo sapiens
gcgggagctccaggaagccctgg

SEQ ID NO: 13702 - DNA, 23 bp, Homo sapiens
cgggagctccaggaagccctgga

SEQ ID NO: 13703 - DNA, 23 bp, Homo sapiens
gggagctccaggaagccctggag

SEQ ID NO: 13704 - DNA, 23 bp, Homo sapiens
ggagctccaggaagccctggagg

SEQ ID NO: 13705 - DNA, 23 bp, Homo sapiens
gagctccaggaagccctggagga

SEQ ID NO: 13706 - DNA, 23 bp, Homo sapiens
agctccaggaagccctggaggag

SEQ ID NO: 13707 - DNA, 23 bp, Homo sapiens
gctccaggaagccctggaggagg

SEQ ID NO: 13708 - DNA, 23 bp, Homo sapiens
ctccaggaagccctggaggagga

SEQ ID NO: 13709 - DNA, 23 bp, Homo sapiens
tccaggaagccctggaggaggag

SEQ ID NO: 13710 - DNA, 23 bp, Homo sapiens
ccaggaagccctggaggaggagg

SEQ ID NO: 13711 - DNA, 23 bp, Homo sapiens
caggaagccctggaggaggaggt

SEQ ID NO: 13712 - DNA, 23 bp, Homo sapiens
aggaagccctggaggaggaggtg

SEQ ID NO: 13713 - DNA, 23 bp, Homo sapiens
ggaagccctggaggaggaggtgc

SEQ ID NO: 13714 - DNA, 23 bp, Homo sapiens
gaagccctggaggaggaggtgct

SEQ ID NO: 13715 - DNA, 23 bp, Homo sapiens
aagccctggaggaggaggtgctc

SEQ ID NO: 13716 - DNA, 23 bp, Homo sapiens
agccctggaggaggaggtgctca

SEQ ID NO: 13717 - DNA, 23 bp, Homo sapiens
gccctggaggaggaggtgctcac

SEQ ID NO: 13718 - DNA, 23 bp, Homo sapiens
ccctggaggaggaggtgctcacc

SEQ ID NO: 13719 - DNA, 23 bp, Homo sapiens
cctggaggaggaggtgctcaccc

SEQ ID NO: 13720 - DNA, 23 bp, Homo sapiens
ctggaggaggaggtgctcacccg

SEQ ID NO: 13721 - DNA, 23 bp, Homo sapiens
tggaggaggaggtgctcacccgg

SEQ ID NO: 13722 - DNA, 23 bp, Homo sapiens
ggaggaggaggtgctcacccggc

SEQ ID NO: 13723 - DNA, 23 bp, Homo sapiens
gaggaggaggtgctcacccggca

SEQ ID NO: 13724 - DNA, 23 bp, Homo sapiens
aggaggaggtgctcacccggcag

SEQ ID NO: 13725 - DNA, 23 bp, Homo sapiens
ggaggaggtgctcacccggcaga

SEQ ID NO: 13726 - DNA, 23 bp, Homo sapiens
gaggaggtgctcacccggcagag

SEQ ID NO: 13727 - DNA, 23 bp, Homo sapiens
aggaggtgctcacccggcagagc

SEQ ID NO: 13728 - DNA, 23 bp, Homo sapiens
ggaggtgctcacccggcagagcc

SEQ ID NO: 13729 - DNA, 23 bp, Homo sapiens
gaggtgctcacccggcagagcct

SEQ ID NO: 13730 - DNA, 23 bp, Homo sapiens
aggtgctcacccggcagagcctg

SEQ ID NO: 13731 - DNA, 23 bp, Homo sapiens
ggtgctcacccggcagagcctga

SEQ ID NO: 13732 - DNA, 23 bp, Homo sapiens
gtgctcacccggcagagcctgag

SEQ ID NO: 13733 - DNA, 23 bp, Homo sapiens
tgctcacccggcagagcctgagc

SEQ ID NO: 13734 - DNA, 23 bp, Homo sapiens
gctcacccggcagagcctgagcc

SEQ ID NO: 13735 - DNA, 23 bp, Homo sapiens
ctcacccggcagagcctgagccg

SEQ ID NO: 13736 - DNA, 23 bp, Homo sapiens
tcacccggcagagcctgagccgg

SEQ ID NO: 13737 - DNA, 23 bp, Homo sapiens
cacccggcagagcctgagccggg

SEQ ID NO: 13738 - DNA, 23 bp, Homo sapiens
acccggcagagcctgagccggga

SEQ ID NO: 13739 - DNA, 23 bp, Homo sapiens
cccggcagagcctgagccgggag

SEQ ID NO: 13740 - DNA, 23 bp, Homo sapiens
ccggcagagcctgagccgggaga

SEQ ID NO: 13741 - DNA, 23 bp, Homo sapiens
cggcagagcctgagccgggagat

SEQ ID NO: 13742 - DNA, 23 bp, Homo sapiens
ggcagagcctgagccgggagatg

SEQ ID NO: 13743 - DNA, 23 bp, Homo sapiens
gcagagcctgagccgggagatgg

SEQ ID NO: 13744 - DNA, 23 bp, Homo sapiens
cagagcctgagccgggagatgga

SEQ ID NO: 13745 - DNA, 23 bp, Homo sapiens
agagcctgagccgggagatggag

SEQ ID NO: 13746 - DNA, 23 bp, Homo sapiens
gagcctgagccgggagatggagg

SEQ ID NO: 13747 - DNA, 23 bp, Homo sapiens
agcctgagccgggagatggaggc

SEQ ID NO: 13748 - DNA, 23 bp, Homo sapiens
gcctgagccgggagatggaggcc

SEQ ID NO: 13749 - DNA, 23 bp, Homo sapiens
cctgagccgggagatggaggcca

SEQ ID NO: 13750 - DNA, 23 bp, Homo sapiens
ctgagccgggagatggaggccat

SEQ ID NO: 13751 - DNA, 23 bp, Homo sapiens
tgagccgggagatggaggccatc

SEQ ID NO: 13752 - DNA, 23 bp, Homo sapiens
gagccgggagatggaggccatcc

SEQ ID NO: 13753 - DNA, 23 bp, Homo sapiens
agccgggagatggaggccatccg

SEQ ID NO: 13754 - DNA, 23 bp, Homo sapiens
gccgggagatggaggccatccgc

SEQ ID NO: 13755 - DNA, 23 bp, Homo sapiens
ccgggagatggaggccatccgca

SEQ ID NO: 13756 - DNA, 23 bp, Homo sapiens
cgggagatggaggccatccgcac

SEQ ID NO: 13757 - DNA, 23 bp, Homo sapiens
gggagatggaggccatccgcacg

SEQ ID NO: 13758 - DNA, 23 bp, Homo sapiens
ggagatggaggccatccgcacgg

SEQ ID NO: 13759 - DNA, 23 bp, Homo sapiens
gagatggaggccatccgcacgga

SEQ ID NO: 13760 - DNA, 23 bp, Homo sapiens
agatggaggccatccgcacggac

SEQ ID NO: 13761 - DNA, 23 bp, Homo sapiens
gatggaggccatccgcacggaca

SEQ ID NO: 13762 - DNA, 23 bp, Homo sapiens
atggaggccatccgcacggacaa

SEQ ID NO: 13763 - DNA, 23 bp, Homo sapiens
tggaggccatccgcacggacaac

SEQ ID NO: 13764 - DNA, 23 bp, Homo sapiens
ggaggccatccgcacggacaacc

SEQ ID NO: 13765 - DNA, 23 bp, Homo sapiens
gaggccatccgcacggacaacca

SEQ ID NO: 13766 - DNA, 23 bp, Homo sapiens
aggccatccgcacggacaaccag

SEQ ID NO: 13767 - DNA, 23 bp, Homo sapiens
ggccatccgcacggacaaccaga

SEQ ID NO: 13768 - DNA, 23 bp, Homo sapiens
gccatccgcacggacaaccagaa

SEQ ID NO: 13769 - DNA, 23 bp, Homo sapiens
ccatccgcacggacaaccagaac

SEQ ID NO: 13770 - DNA, 23 bp, Homo sapiens
catccgcacggacaaccagaact

SEQ ID NO: 13771 - DNA, 23 bp, Homo sapiens
atccgcacggacaaccagaactt

SEQ ID NO: 13772 - DNA, 23 bp, Homo sapiens
tccgcacggacaaccagaacttc

SEQ ID NO: 13773 - DNA, 23 bp, Homo sapiens
ccgcacggacaaccagaacttcg

SEQ ID NO: 13774 - DNA, 23 bp, Homo sapiens
cgcacggacaaccagaacttcgc

SEQ ID NO: 13775 - DNA, 23 bp, Homo sapiens
gcacggacaaccagaacttcgcc

SEQ ID NO: 13776 - DNA, 23 bp, Homo sapiens
cacggacaaccagaacttcgcca

SEQ ID NO: 13777 - DNA, 23 bp, Homo sapiens
acggacaaccagaacttcgccag

SEQ ID NO: 13778 - DNA, 23 bp, Homo sapiens
cggacaaccagaacttcgccagt

SEQ ID NO: 13779 - DNA, 23 bp, Homo sapiens
ggacaaccagaacttcgccagtc

SEQ ID NO: 13780 - DNA, 23 bp, Homo sapiens
gacaaccagaacttcgccagtca

SEQ ID NO: 13781 - DNA, 23 bp, Homo sapiens
acaaccagaacttcgccagtcaa

SEQ ID NO: 13782 - DNA, 23 bp, Homo sapiens
caaccagaacttcgccagtcaac

SEQ ID NO: 13783 - DNA, 23 bp, Homo sapiens
aaccagaacttcgccagtcaact

SEQ ID NO: 13784 - DNA, 23 bp, Homo sapiens
accagaacttcgccagtcaacta

SEQ ID NO: 13785 - DNA, 23 bp, Homo sapiens
ccagaacttcgccagtcaactac

SEQ ID NO: 13786 - DNA, 23 bp, Homo sapiens
cagaacttcgccagtcaactacg

SEQ ID NO: 13787 - DNA, 23 bp, Homo sapiens
agaacttcgccagtcaactacgc

SEQ ID NO: 13788 - DNA, 23 bp, Homo sapiens
gaacttcgccagtcaactacgcg

SEQ ID NO: 13789 - DNA, 23 bp, Homo sapiens
aacttcgccagtcaactacgcga

SEQ ID NO: 13790 - DNA, 23 bp, Homo sapiens
acttcgccagtcaactacgcgag

SEQ ID NO: 13791 - DNA, 23 bp, Homo sapiens
cttcgccagtcaactacgcgagg

SEQ ID NO: 13792 - DNA, 23 bp, Homo sapiens
ttcgccagtcaactacgcgaggc

SEQ ID NO: 13793 - DNA, 23 bp, Homo sapiens
tcgccagtcaactacgcgaggca

SEQ ID NO: 13794 - DNA, 23 bp, Homo sapiens
cgccagtcaactacgcgaggcag

SEQ ID NO: 13795 - DNA, 23 bp, Homo sapiens
gccagtcaactacgcgaggcaga

SEQ ID NO: 13796 - DNA, 23 bp, Homo sapiens
ccagtcaactacgcgaggcagag

SEQ ID NO: 13797 - DNA, 23 bp, Homo sapiens
cagtcaactacgcgaggcagagg

SEQ ID NO: 13798 - DNA, 23 bp, Homo sapiens
agtcaactacgcgaggcagaggc

SEQ ID NO: 13799 - DNA, 23 bp, Homo sapiens
gtcaactacgcgaggcagaggct

SEQ ID NO: 13800 - DNA, 23 bp, Homo sapiens
tcaactacgcgaggcagaggctc

SEQ ID NO: 13801 - DNA, 23 bp, Homo sapiens
caactacgcgaggcagaggctcg

SEQ ID NO: 13802 - DNA, 23 bp, Homo sapiens
aactacgcgaggcagaggctcgg

SEQ ID NO: 13803 - DNA, 23 bp, Homo sapiens
actacgcgaggcagaggctcgga

SEQ ID NO: 13804 - DNA, 23 bp, Homo sapiens
ctacgcgaggcagaggctcggaa

SEQ ID NO: 13805 - DNA, 23 bp, Homo sapiens
tacgcgaggcagaggctcggaac

SEQ ID NO: 13806 - DNA, 23 bp, Homo sapiens
acgcgaggcagaggctcggaacc

SEQ ID NO: 13807 - DNA, 23 bp, Homo sapiens
cgcgaggcagaggctcggaaccg

SEQ ID NO: 13808 - DNA, 23 bp, Homo sapiens
gcgaggcagaggctcggaaccgg

SEQ ID NO: 13809 - DNA, 23 bp, Homo sapiens
cgaggcagaggctcggaaccggg

SEQ ID NO: 13810 - DNA, 23 bp, Homo sapiens
gaggcagaggctcggaaccggga

SEQ ID NO: 13811 - DNA, 23 bp, Homo sapiens
aggcagaggctcggaaccgggac

SEQ ID NO: 13812 - DNA, 23 bp, Homo sapiens
ggcagaggctcggaaccgggacc

SEQ ID NO: 13813 - DNA, 23 bp, Homo sapiens
gcagaggctcggaaccgggacct

SEQ ID NO: 13814 - DNA, 23 bp, Homo sapiens
cagaggctcggaaccgggaccta

SEQ ID NO: 13815 - DNA, 23 bp, Homo sapiens
agaggctcggaaccgggacctag

SEQ ID NO: 13816 - DNA, 23 bp, Homo sapiens
gaggctcggaaccgggacctaga

SEQ ID NO: 13817 - DNA, 23 bp, Homo sapiens
aggctcggaaccgggacctagag

SEQ ID NO: 13818 - DNA, 23 bp, Homo sapiens
ggctcggaaccgggacctagagg

SEQ ID NO: 13819 - DNA, 23 bp, Homo sapiens
gctcggaaccgggacctagaggc

SEQ ID NO: 13820 - DNA, 23 bp, Homo sapiens
ctcggaaccgggacctagaggca

SEQ ID NO: 13821 - DNA, 23 bp, Homo sapiens
tcggaaccgggacctagaggcac

SEQ ID NO: 13822 - DNA, 23 bp, Homo sapiens
cggaaccgggacctagaggcaca

SEQ ID NO: 13823 - DNA, 23 bp, Homo sapiens
ggaaccgggacctagaggcacac

SEQ ID NO: 13824 - DNA, 23 bp, Homo sapiens
gaaccgggacctagaggcacacg

SEQ ID NO: 13825 - DNA, 23 bp, Homo sapiens
aaccgggacctagaggcacacgt

SEQ ID NO: 13826 - DNA, 23 bp, Homo sapiens
accgggacctagaggcacacgtc

SEQ ID NO: 13827 - DNA, 23 bp, Homo sapiens
ccgggacctagaggcacacgtcc

SEQ ID NO: 13828 - DNA, 23 bp, Homo sapiens
cgggacctagaggcacacgtccg

SEQ ID NO: 13829 - DNA, 23 bp, Homo sapiens
gggacctagaggcacacgtccgg

SEQ ID NO: 13830 - DNA, 23 bp, Homo sapiens
ggacctagaggcacacgtccggc

SEQ ID NO: 13831 - DNA, 23 bp, Homo sapiens
gacctagaggcacacgtccggca

SEQ ID NO: 13832 - DNA, 23 bp, Homo sapiens
acctagaggcacacgtccggcag

SEQ ID NO: 13833 - DNA, 23 bp, Homo sapiens
cctagaggcacacgtccggcagt

SEQ ID NO: 13834 - DNA, 23 bp, Homo sapiens
ctagaggcacacgtccggcagtt

SEQ ID NO: 13835 - DNA, 23 bp, Homo sapiens
tagaggcacacgtccggcagttg

SEQ ID NO: 13836 - DNA, 23 bp, Homo sapiens
agaggcacacgtccggcagttgc

SEQ ID NO: 13837 - DNA, 23 bp, Homo sapiens
gaggcacacgtccggcagttgca

SEQ ID NO: 13838 - DNA, 23 bp, Homo sapiens
aggcacacgtccggcagttgcag

SEQ ID NO: 13839 - DNA, 23 bp, Homo sapiens
ggcacacgtccggcagttgcagg

SEQ ID NO: 13840 - DNA, 23 bp, Homo sapiens
gcacacgtccggcagttgcagga

SEQ ID NO: 13841 - DNA, 23 bp, Homo sapiens
cacacgtccggcagttgcaggag

SEQ ID NO: 13842 - DNA, 23 bp, Homo sapiens
acacgtccggcagttgcaggagc

SEQ ID NO: 13843 - DNA, 23 bp, Homo sapiens
cacgtccggcagttgcaggagcg

SEQ ID NO: 13844 - DNA, 23 bp, Homo sapiens
acgtccggcagttgcaggagcgg

SEQ ID NO: 13845 - DNA, 23 bp, Homo sapiens
cgtccggcagttgcaggagcgga

SEQ ID NO: 13846 - DNA, 23 bp, Homo sapiens
gtccggcagttgcaggagcggat

SEQ ID NO: 13847 - DNA, 23 bp, Homo sapiens
tccggcagttgcaggagcggatg

SEQ ID NO: 13848 - DNA, 23 bp, Homo sapiens
ccggcagttgcaggagcggatgg

SEQ ID NO: 13849 - DNA, 23 bp, Homo sapiens
cggcagttgcaggagcggatgga

SEQ ID NO: 13850 - DNA, 23 bp, Homo sapiens
ggcagttgcaggagcggatggag

SEQ ID NO: 13851 - DNA, 23 bp, Homo sapiens
gcagttgcaggagcggatggagt

SEQ ID NO: 13852 - DNA, 23 bp, Homo sapiens
cagttgcaggagcggatggagtt

SEQ ID NO: 13853 - DNA, 23 bp, Homo sapiens
agttgcaggagcggatggagttg

SEQ ID NO: 13854 - DNA, 23 bp, Homo sapiens
gttgcaggagcggatggagttgc

SEQ ID NO: 13855 - DNA, 23 bp, Homo sapiens
ttgcaggagcggatggagttgct

SEQ ID NO: 13856 - DNA, 23 bp, Homo sapiens
tgcaggagcggatggagttgctg

SEQ ID NO: 13857 - DNA, 23 bp, Homo sapiens
gcaggagcggatggagttgctgc

SEQ ID NO: 13858 - DNA, 23 bp, Homo sapiens
caggagcggatggagttgctgca

SEQ ID NO: 13859 - DNA, 23 bp, Homo sapiens
aggagcggatggagttgctgcag

SEQ ID NO: 13860 - DNA, 23 bp, Homo sapiens
ggagcggatggagttgctgcagg

SEQ ID NO: 13861 - DNA, 23 bp, Homo sapiens
gagcggatggagttgctgcaggc

SEQ ID NO: 13862 - DNA, 23 bp, Homo sapiens
agcggatggagttgctgcaggca

SEQ ID NO: 13863 - DNA, 23 bp, Homo sapiens
gcggatggagttgctgcaggcag

SEQ ID NO: 13864 - DNA, 23 bp, Homo sapiens
cggatggagttgctgcaggcaga

SEQ ID NO: 13865 - DNA, 23 bp, Homo sapiens
ggatggagttgctgcaggcagag

SEQ ID NO: 13866 - DNA, 23 bp, Homo sapiens
gatggagttgctgcaggcagagg

SEQ ID NO: 13867 - DNA, 23 bp, Homo sapiens
atggagttgctgcaggcagaggg

SEQ ID NO: 13868 - DNA, 23 bp, Homo sapiens
tggagttgctgcaggcagaggga

SEQ ID NO: 13869 - DNA, 23 bp, Homo sapiens
ggagttgctgcaggcagagggag

SEQ ID NO: 13870 - DNA, 23 bp, Homo sapiens
gagttgctgcaggcagagggagc

SEQ ID NO: 13871 - DNA, 23 bp, Homo sapiens
agttgctgcaggcagagggagcc

SEQ ID NO: 13872 - DNA, 23 bp, Homo sapiens
gttgctgcaggcagagggagcca

SEQ ID NO: 13873 - DNA, 23 bp, Homo sapiens
ttgctgcaggcagagggagccac

SEQ ID NO: 13874 - DNA, 23 bp, Homo sapiens
tgctgcaggcagagggagccaca

SEQ ID NO: 13875 - DNA, 23 bp, Homo sapiens
gctgcaggcagagggagccacag

SEQ ID NO: 13876 - DNA, 23 bp, Homo sapiens
ctgcaggcagagggagccacagg

SEQ ID NO: 13877 - DNA, 23 bp, Homo sapiens
tgcaggcagagggagccacaggt

SEQ ID NO: 13878 - DNA, 23 bp, Homo sapiens
gcaggcagagggagccacaggtc

SEQ ID NO: 13879 - DNA, 23 bp, Homo sapiens
caggcagagggagccacaggtcc

SEQ ID NO: 13880 - DNA, 23 bp, Homo sapiens
aggcagagggagccacaggtccc

SEQ ID NO: 13881 - DNA, 23 bp, Homo sapiens
ggcagagggagccacaggtccct

SEQ ID NO: 13882 - DNA, 23 bp, Homo sapiens
gcagagggagccacaggtcccta

SEQ ID NO: 13883 - DNA, 23 bp, Homo sapiens
cagagggagccacaggtccctag

SEQ ID NO: 13884 - DNA, 23 bp, Homo sapiens
agagggagccacaggtccctagg

SEQ ID NO: 13885 - DNA, 23 bp, Homo sapiens
gagggagccacaggtccctaggc

SEQ ID NO: 13886 - DNA, 23 bp, Homo sapiens
agggagccacaggtccctaggcc

SEQ ID NO: 13887 - DNA, 23 bp, Homo sapiens
gggagccacaggtccctaggcct

SEQ ID NO: 13888 - DNA, 23 bp, Homo sapiens
ggagccacaggtccctaggcctg

SEQ ID NO: 13889 - DNA, 23 bp, Homo sapiens
gagccacaggtccctaggcctgg

SEQ ID NO: 13890 - DNA, 23 bp, Homo sapiens
agccacaggtccctaggcctggc

SEQ ID NO: 13891 - DNA, 23 bp, Homo sapiens
gccacaggtccctaggcctggcc

SEQ ID NO: 13892 - DNA, 23 bp, Homo sapiens
ccacaggtccctaggcctggcct

SEQ ID NO: 13893 - DNA, 23 bp, Homo sapiens
cacaggtccctaggcctggccta

SEQ ID NO: 13894 - DNA, 23 bp, Homo sapiens
acaggtccctaggcctggcctat

SEQ ID NO: 13895 - DNA, 23 bp, Homo sapiens
caggtccctaggcctggcctatc

SEQ ID NO: 13896 - DNA, 23 bp, Homo sapiens
aggtccctaggcctggcctatcg

SEQ ID NO: 13897 - DNA, 23 bp, Homo sapiens
ggtccctaggcctggcctatcgg

SEQ ID NO: 13898 - DNA, 23 bp, Homo sapiens
gtccctaggcctggcctatcgga

SEQ ID NO: 13899 - DNA, 23 bp, Homo sapiens
tccctaggcctggcctatcggag

SEQ ID NO: 13900 - DNA, 23 bp, Homo sapiens
ccctaggcctggcctatcggagg

SEQ ID NO: 13901 - DNA, 23 bp, Homo sapiens
cctaggcctggcctatcggaggc

SEQ ID NO: 13902 - DNA, 23 bp, Homo sapiens
ctaggcctggcctatcggaggcg

SEQ ID NO: 13903 - DNA, 23 bp, Homo sapiens
taggcctggcctatcggaggcgc

SEQ ID NO: 13904 - DNA, 23 bp, Homo sapiens
aggcctggcctatcggaggcgct

SEQ ID NO: 13905 - DNA, 23 bp, Homo sapiens
ggcctggcctatcggaggcgctt

SEQ ID NO: 13906 - DNA, 23 bp, Homo sapiens
gcctggcctatcggaggcgcttt

SEQ ID NO: 13907 - DNA, 23 bp, Homo sapiens
cctggcctatcggaggcgctttc

SEQ ID NO: 13908 - DNA, 23 bp, Homo sapiens
ctggcctatcggaggcgctttcc

SEQ ID NO: 13909 - DNA, 23 bp, Homo sapiens
tggcctatcggaggcgctttccc

SEQ ID NO: 13910 - DNA, 23 bp, Homo sapiens
ggcctatcggaggcgctttccct

SEQ ID NO: 13911 - DNA, 23 bp, Homo sapiens
gcctatcggaggcgctttccctg

SEQ ID NO: 13912 - DNA, 23 bp, Homo sapiens
cctatcggaggcgctttccctgc

SEQ ID NO: 13913 - DNA, 23 bp, Homo sapiens
ctatcggaggcgctttccctgct

SEQ ID NO: 13914 - DNA, 23 bp, Homo sapiens
tatcggaggcgctttccctgctc

SEQ ID NO: 13915 - DNA, 23 bp, Homo sapiens
atcggaggcgctttccctgctcc

SEQ ID NO: 13916 - DNA, 23 bp, Homo sapiens
tcggaggcgctttccctgctcct

SEQ ID NO: 13917 - DNA, 23 bp, Homo sapiens
cggaggcgctttccctgctcctg

SEQ ID NO: 13918 - DNA, 23 bp, Homo sapiens
ggaggcgctttccctgctcctgt

SEQ ID NO: 13919 - DNA, 23 bp, Homo sapiens
gaggcgctttccctgctcctgtt

SEQ ID NO: 13920 - DNA, 23 bp, Homo sapiens
aggcgctttccctgctcctgttc

SEQ ID NO: 13921 - DNA, 23 bp, Homo sapiens
ggcgctttccctgctcctgttcg

SEQ ID NO: 13922 - DNA, 23 bp, Homo sapiens
gcgctttccctgctcctgttcgc

SEQ ID NO: 13923 - DNA, 23 bp, Homo sapiens
cgctttccctgctcctgttcgcc

SEQ ID NO: 13924 - DNA, 23 bp, Homo sapiens
gctttccctgctcctgttcgccg

SEQ ID NO: 13925 - DNA, 23 bp, Homo sapiens
ctttccctgctcctgttcgccgt

SEQ ID NO: 13926 - DNA, 23 bp, Homo sapiens
tttccctgctcctgttcgccgtt

SEQ ID NO: 13927 - DNA, 23 bp, Homo sapiens
ttccctgctcctgttcgccgttg

SEQ ID NO: 13928 - DNA, 23 bp, Homo sapiens
tccctgctcctgttcgccgttgt

SEQ ID NO: 13929 - DNA, 23 bp, Homo sapiens
ccctgctcctgttcgccgttgtt

SEQ ID NO: 13930 - DNA, 23 bp, Homo sapiens
cctgctcctgttcgccgttgttc

SEQ ID NO: 13931 - DNA, 23 bp, Homo sapiens
ctgctcctgttcgccgttgttct

SEQ ID NO: 13932 - DNA, 23 bp, Homo sapiens
tgctcctgttcgccgttgttctg

SEQ ID NO: 13933 - DNA, 23 bp, Homo sapiens
gctcctgttcgccgttgttctgt

SEQ ID NO: 13934 - DNA, 23 bp, Homo sapiens
ctcctgttcgccgttgttctgtc

SEQ ID NO: 13935 - DNA, 23 bp, Homo sapiens
tcctgttcgccgttgttctgtct

SEQ ID NO: 13936 - DNA, 23 bp, Homo sapiens
cctgttcgccgttgttctgtctc

SEQ ID NO: 13937 - DNA, 23 bp, Homo sapiens
ctgttcgccgttgttctgtctcg

SEQ ID NO: 13938 - DNA, 23 bp, Homo sapiens
tgttcgccgttgttctgtctcgt

SEQ ID NO: 13939 - DNA, 23 bp, Homo sapiens
gttcgccgttgttctgtctcgtg

SEQ ID NO: 13940 - DNA, 23 bp, Homo sapiens
ttcgccgttgttctgtctcgtgc

SEQ ID NO: 13941 - DNA, 23 bp, Homo sapiens
tcgccgttgttctgtctcgtgcc

SEQ ID NO: 13942 - DNA, 23 bp, Homo sapiens
cgccgttgttctgtctcgtgccg

SEQ ID NO: 13943 - DNA, 23 bp, Homo sapiens
gccgttgttctgtctcgtgccgc

SEQ ID NO: 13944 - DNA, 23 bp, Homo sapiens
ccgttgttctgtctcgtgccgcc

SEQ ID NO: 13945 - DNA, 23 bp, Homo sapiens
cgttgttctgtctcgtgccgccg

SEQ ID NO: 13946 - DNA, 23 bp, Homo sapiens
gttgttctgtctcgtgccgccgc

SEQ ID NO: 13947 - DNA, 23 bp, Homo sapiens
ttgttctgtctcgtgccgccgcc

SEQ ID NO: 13948 - DNA, 23 bp, Homo sapiens
tgttctgtctcgtgccgccgccc

SEQ ID NO: 13949 - DNA, 23 bp, Homo sapiens
gttctgtctcgtgccgccgccct

SEQ ID NO: 13950 - DNA, 23 bp, Homo sapiens
ttctgtctcgtgccgccgccctg

SEQ ID NO: 13951 - DNA, 23 bp, Homo sapiens
tctgtctcgtgccgccgccctgg

SEQ ID NO: 13952 - DNA, 23 bp, Homo sapiens
ctgtctcgtgccgccgccctggg

SEQ ID NO: 13953 - DNA, 23 bp, Homo sapiens
tgtctcgtgccgccgccctgggc

SEQ ID NO: 13954 - DNA, 23 bp, Homo sapiens
gtctcgtgccgccgccctgggct

SEQ ID NO: 13955 - DNA, 23 bp, Homo sapiens
tctcgtgccgccgccctgggctg

SEQ ID NO: 13956 - DNA, 23 bp, Homo sapiens
ctcgtgccgccgccctgggctgc

SEQ ID NO: 13957 - DNA, 23 bp, Homo sapiens
tcgtgccgccgccctgggctgca

SEQ ID NO: 13958 - DNA, 23 bp, Homo sapiens
cgtgccgccgccctgggctgcat

SEQ ID NO: 13959 - DNA, 23 bp, Homo sapiens
gtgccgccgccctgggctgcatt

SEQ ID NO: 13960 - DNA, 23 bp, Homo sapiens
tgccgccgccctgggctgcattg

SEQ ID NO: 13961 - DNA, 23 bp, Homo sapiens
gccgccgccctgggctgcattgg

SEQ ID NO: 13962 - DNA, 23 bp, Homo sapiens
ccgccgccctgggctgcattggg

SEQ ID NO: 13963 - DNA, 23 bp, Homo sapiens
cgccgccctgggctgcattgggt

SEQ ID NO: 13964 - DNA, 23 bp, Homo sapiens
gccgccctgggctgcattgggtt

SEQ ID NO: 13965 - DNA, 23 bp, Homo sapiens
ccgccctgggctgcattgggttg

SEQ ID NO: 13966 - DNA, 23 bp, Homo sapiens
cgccctgggctgcattgggttgg

SEQ ID NO: 13967 - DNA, 23 bp, Homo sapiens
gccctgggctgcattgggttggt

SEQ ID NO: 13968 - DNA, 23 bp, Homo sapiens
ccctgggctgcattgggttggtg

SEQ ID NO: 13969 - DNA, 23 bp, Homo sapiens
cctgggctgcattgggttggtgg

SEQ ID NO: 13970 - DNA, 23 bp, Homo sapiens
ctgggctgcattgggttggtggc

SEQ ID NO: 13971 - DNA, 23 bp, Homo sapiens
tgggctgcattgggttggtggcc

SEQ ID NO: 13972 - DNA, 23 bp, Homo sapiens
gggctgcattgggttggtggccc

SEQ ID NO: 13973 - DNA, 23 bp, Homo sapiens
ggctgcattgggttggtggccca

SEQ ID NO: 13974 - DNA, 23 bp, Homo sapiens
gctgcattgggttggtggcccac

SEQ ID NO: 13975 - DNA, 23 bp, Homo sapiens
ctgcattgggttggtggcccacg

SEQ ID NO: 13976 - DNA, 23 bp, Homo sapiens
tgcattgggttggtggcccacgc

SEQ ID NO: 13977 - DNA, 23 bp, Homo sapiens
gcattgggttggtggcccacgcc

SEQ ID NO: 13978 - DNA, 23 bp, Homo sapiens
cattgggttggtggcccacgccg

SEQ ID NO: 13979 - DNA, 23 bp, Homo sapiens
attgggttggtggcccacgccgg

SEQ ID NO: 13980 - DNA, 23 bp, Homo sapiens
ttgggttggtggcccacgccggc

SEQ ID NO: 13981 - DNA, 23 bp, Homo sapiens
tgggttggtggcccacgccggcc

SEQ ID NO: 13982 - DNA, 23 bp, Homo sapiens
gggttggtggcccacgccggcca

SEQ ID NO: 13983 - DNA, 23 bp, Homo sapiens
ggttggtggcccacgccggccaa

SEQ ID NO: 13984 - DNA, 23 bp, Homo sapiens
gttggtggcccacgccggccaac

SEQ ID NO: 13985 - DNA, 23 bp, Homo sapiens
ttggtggcccacgccggccaact

SEQ ID NO: 13986 - DNA, 23 bp, Homo sapiens
tggtggcccacgccggccaactc

SEQ ID NO: 13987 - DNA, 23 bp, Homo sapiens
ggtggcccacgccggccaactca

SEQ ID NO: 13988 - DNA, 23 bp, Homo sapiens
gtggcccacgccggccaactcac

SEQ ID NO: 13989 - DNA, 23 bp, Homo sapiens
tggcccacgccggccaactcacc

SEQ ID NO: 13990 - DNA, 23 bp, Homo sapiens
ggcccacgccggccaactcaccg

SEQ ID NO: 13991 - DNA, 23 bp, Homo sapiens
gcccacgccggccaactcaccgc

SEQ ID NO: 13992 - DNA, 23 bp, Homo sapiens
cccacgccggccaactcaccgca

SEQ ID NO: 13993 - DNA, 23 bp, Homo sapiens
ccacgccggccaactcaccgcag

SEQ ID NO: 13994 - DNA, 23 bp, Homo sapiens
cacgccggccaactcaccgcagt

SEQ ID NO: 13995 - DNA, 23 bp, Homo sapiens
acgccggccaactcaccgcagtc

SEQ ID NO: 13996 - DNA, 23 bp, Homo sapiens
cgccggccaactcaccgcagtct

SEQ ID NO: 13997 - DNA, 23 bp, Homo sapiens
gccggccaactcaccgcagtctg

SEQ ID NO: 13998 - DNA, 23 bp, Homo sapiens
ccggccaactcaccgcagtctgg

SEQ ID NO: 13999 - DNA, 23 bp, Homo sapiens
cggccaactcaccgcagtctggc

SEQ ID NO: 14000 - DNA, 23 bp, Homo sapiens
ggccaactcaccgcagtctggcg

SEQ ID NO: 14001 - DNA, 23 bp, Homo sapiens
gccaactcaccgcagtctggcgc

SEQ ID NO: 14002 - DNA, 23 bp, Homo sapiens
ccaactcaccgcagtctggcgcc

SEQ ID NO: 14003 - DNA, 23 bp, Homo sapiens
caactcaccgcagtctggcgccg

SEQ ID NO: 14004 - DNA, 23 bp, Homo sapiens
aactcaccgcagtctggcgccgc

SEQ ID NO: 14005 - DNA, 23 bp, Homo sapiens
actcaccgcagtctggcgccgcc

SEQ ID NO: 14006 - DNA, 23 bp, Homo sapiens
ctcaccgcagtctggcgccgccc

SEQ ID NO: 14007 - DNA, 23 bp, Homo sapiens
tcaccgcagtctggcgccgccca

SEQ ID NO: 14008 - DNA, 23 bp, Homo sapiens
caccgcagtctggcgccgcccag

SEQ ID NO: 14009 - DNA, 23 bp, Homo sapiens
accgcagtctggcgccgcccagg

SEQ ID NO: 14010 - DNA, 23 bp, Homo sapiens
ccgcagtctggcgccgcccagga

SEQ ID NO: 14011 - DNA, 23 bp, Homo sapiens
cgcagtctggcgccgcccaggag

SEQ ID NO: 14012 - DNA, 23 bp, Homo sapiens
gcagtctggcgccgcccaggagc

SEQ ID NO: 14013 - DNA, 23 bp, Homo sapiens
cagtctggcgccgcccaggagcc

SEQ ID NO: 14014 - DNA, 23 bp, Homo sapiens
agtctggcgccgcccaggagccg

SEQ ID NO: 14015 - DNA, 23 bp, Homo sapiens
gtctggcgccgcccaggagccgc

SEQ ID NO: 14016 - DNA, 23 bp, Homo sapiens
tctggcgccgcccaggagccgcc

SEQ ID NO: 14017 - DNA, 23 bp, Homo sapiens
ctggcgccgcccaggagccgccc

SEQ ID NO: 14018 - DNA, 23 bp, Homo sapiens
tggcgccgcccaggagccgcccg

SEQ ID NO: 14019 - DNA, 23 bp, Homo sapiens
ggcgccgcccaggagccgcccgc

SEQ ID NO: 14020 - DNA, 23 bp, Homo sapiens
gcgccgcccaggagccgcccgcg

SEQ ID NO: 14021 - DNA, 23 bp, Homo sapiens
cgccgcccaggagccgcccgcgc

SEQ ID NO: 14022 - DNA, 23 bp, Homo sapiens
gccgcccaggagccgcccgcgct

SEQ ID NO: 14023 - DNA, 23 bp, Homo sapiens
ccgcccaggagccgcccgcgctc

SEQ ID NO: 14024 - DNA, 23 bp, Homo sapiens
cgcccaggagccgcccgcgctcc

SEQ ID NO: 14025 - DNA, 23 bp, Homo sapiens
gcccaggagccgcccgcgctccc

SEQ ID NO: 14026 - DNA, 23 bp, Homo sapiens
cccaggagccgcccgcgctccct

SEQ ID NO: 14027 - DNA, 23 bp, Homo sapiens
ccaggagccgcccgcgctccctg

SEQ ID NO: 14028 - DNA, 23 bp, Homo sapiens
caggagccgcccgcgctccctga

SEQ ID NO: 14029 - DNA, 23 bp, Homo sapiens
aggagccgcccgcgctccctgaa

SEQ ID NO: 14030 - DNA, 23 bp, Homo sapiens
ggagccgcccgcgctccctgaac

SEQ ID NO: 14031 - DNA, 23 bp, Homo sapiens
gagccgcccgcgctccctgaacc

SEQ ID NO: 14032 - DNA, 23 bp, Homo sapiens
agccgcccgcgctccctgaaccc

SEQ ID NO: 14033 - DNA, 23 bp, Homo sapiens
gccgcccgcgctccctgaaccct

SEQ ID NO: 14034 - DNA, 23 bp, Homo sapiens
ccgcccgcgctccctgaacccta

SEQ ID NO: 14035 - DNA, 23 bp, Homo sapiens
cgcccgcgctccctgaaccctag

SEQ ID NO: 14036 - DNA, 23 bp, Homo sapiens
gcccgcgctccctgaaccctaga

SEQ ID NO: 14037 - DNA, 23 bp, Homo sapiens
cccgcgctccctgaaccctagaa

SEQ ID NO: 14038 - DNA, 23 bp, Homo sapiens
ccgcgctccctgaaccctagaac

SEQ ID NO: 14039 - DNA, 23 bp, Homo sapiens
cgcgctccctgaaccctagaact

SEQ ID NO: 14040 - DNA, 23 bp, Homo sapiens
gcgctccctgaaccctagaactg

SEQ ID NO: 14041 - DNA, 23 bp, Homo sapiens
cgctccctgaaccctagaactgt

SEQ ID NO: 14042 - DNA, 23 bp, Homo sapiens
gctccctgaaccctagaactgtc

SEQ ID NO: 14043 - DNA, 23 bp, Homo sapiens
ctccctgaaccctagaactgtct

SEQ ID NO: 14044 - DNA, 23 bp, Homo sapiens
tccctgaaccctagaactgtctt

SEQ ID NO: 14045 - DNA, 23 bp, Homo sapiens
ccctgaaccctagaactgtcttc

SEQ ID NO: 14046 - DNA, 23 bp, Homo sapiens
cctgaaccctagaactgtcttcg

SEQ ID NO: 14047 - DNA, 23 bp, Homo sapiens
ctgaaccctagaactgtcttcga

SEQ ID NO: 14048 - DNA, 23 bp, Homo sapiens
tgaaccctagaactgtcttcgac

SEQ ID NO: 14049 - DNA, 23 bp, Homo sapiens
gaaccctagaactgtcttcgact

SEQ ID NO: 14050 - DNA, 23 bp, Homo sapiens
aaccctagaactgtcttcgactc

SEQ ID NO: 14051 - DNA, 23 bp, Homo sapiens
accctagaactgtcttcgactcc

SEQ ID NO: 14052 - DNA, 23 bp, Homo sapiens
ccctagaactgtcttcgactccg

SEQ ID NO: 14053 - DNA, 23 bp, Homo sapiens
cctagaactgtcttcgactccgg

SEQ ID NO: 14054 - DNA, 23 bp, Homo sapiens
ctagaactgtcttcgactccggg

SEQ ID NO: 14055 - DNA, 23 bp, Homo sapiens
tagaactgtcttcgactccgggg

SEQ ID NO: 14056 - DNA, 23 bp, Homo sapiens
agaactgtcttcgactccggggc

SEQ ID NO: 14057 - DNA, 23 bp, Homo sapiens
gaactgtcttcgactccggggcc

SEQ ID NO: 14058 - DNA, 23 bp, Homo sapiens
aactgtcttcgactccggggccc

SEQ ID NO: 14059 - DNA, 23 bp, Homo sapiens
actgtcttcgactccggggcccc

SEQ ID NO: 14060 - DNA, 23 bp, Homo sapiens
ctgtcttcgactccggggccccg

SEQ ID NO: 14061 - DNA, 23 bp, Homo sapiens
tgtcttcgactccggggccccgt

SEQ ID NO: 14062 - DNA, 23 bp, Homo sapiens
gtcttcgactccggggccccgtt

SEQ ID NO: 14063 - DNA, 23 bp, Homo sapiens
tcttcgactccggggccccgttg

SEQ ID NO: 14064 - DNA, 23 bp, Homo sapiens
cttcgactccggggccccgttgg

SEQ ID NO: 14065 - DNA, 23 bp, Homo sapiens
ttcgactccggggccccgttgga

SEQ ID NO: 14066 - DNA, 23 bp, Homo sapiens
tcgactccggggccccgttggaa

SEQ ID NO: 14067 - DNA, 23 bp, Homo sapiens
cgactccggggccccgttggaag

SEQ ID NO: 14068 - DNA, 23 bp, Homo sapiens
gactccggggccccgttggaaga

SEQ ID NO: 14069 - DNA, 23 bp, Homo sapiens
actccggggccccgttggaagac

SEQ ID NO: 14070 - DNA, 23 bp, Homo sapiens
ctccggggccccgttggaagact

SEQ ID NO: 14071 - DNA, 23 bp, Homo sapiens
tccggggccccgttggaagactg

SEQ ID NO: 14072 - DNA, 23 bp, Homo sapiens
ccggggccccgttggaagactga

SEQ ID NO: 14073 - DNA, 23 bp, Homo sapiens
cggggccccgttggaagactgag

SEQ ID NO: 14074 - DNA, 23 bp, Homo sapiens
ggggccccgttggaagactgagt

SEQ ID NO: 14075 - DNA, 23 bp, Homo sapiens
gggccccgttggaagactgagtg

SEQ ID NO: 14076 - DNA, 23 bp, Homo sapiens
ggccccgttggaagactgagtgc

SEQ ID NO: 14077 - DNA, 23 bp, Homo sapiens
gccccgttggaagactgagtgcc

SEQ ID NO: 14078 - DNA, 23 bp, Homo sapiens
ccccgttggaagactgagtgccc

SEQ ID NO: 14079 - DNA, 23 bp, Homo sapiens
cccgttggaagactgagtgcccg

SEQ ID NO: 14080 - DNA, 23 bp, Homo sapiens
ccgttggaagactgagtgcccgg

SEQ ID NO: 14081 - DNA, 23 bp, Homo sapiens
cgttggaagactgagtgcccggg

SEQ ID NO: 14082 - DNA, 23 bp, Homo sapiens
gttggaagactgagtgcccgggg

SEQ ID NO: 14083 - DNA, 23 bp, Homo sapiens
ttggaagactgagtgcccggggc

SEQ ID NO: 14084 - DNA, 23 bp, Homo sapiens
tggaagactgagtgcccggggca

SEQ ID NO: 14085 - DNA, 23 bp, Homo sapiens
ggaagactgagtgcccggggcac

SEQ ID NO: 14086 - DNA, 23 bp, Homo sapiens
gaagactgagtgcccggggcacg

SEQ ID NO: 14087 - DNA, 23 bp, Homo sapiens
aagactgagtgcccggggcacgg

SEQ ID NO: 14088 - DNA, 23 bp, Homo sapiens
agactgagtgcccggggcacggc

SEQ ID NO: 14089 - DNA, 23 bp, Homo sapiens
gactgagtgcccggggcacggca

SEQ ID NO: 14090 - DNA, 23 bp, Homo sapiens
actgagtgcccggggcacggcac

SEQ ID NO: 14091 - DNA, 23 bp, Homo sapiens
ctgagtgcccggggcacggcaca

SEQ ID NO: 14092 - DNA, 23 bp, Homo sapiens
tgagtgcccggggcacggcacag

SEQ ID NO: 14093 - DNA, 23 bp, Homo sapiens
gagtgcccggggcacggcacaga

SEQ ID NO: 14094 - DNA, 23 bp, Homo sapiens
agtgcccggggcacggcacagaa

SEQ ID NO: 14095 - DNA, 23 bp, Homo sapiens
gtgcccggggcacggcacagaag

SEQ ID NO: 14096 - DNA, 23 bp, Homo sapiens
tgcccggggcacggcacagaagc

SEQ ID NO: 14097 - DNA, 23 bp, Homo sapiens
gcccggggcacggcacagaagcc

SEQ ID NO: 14098 - DNA, 23 bp, Homo sapiens
cccggggcacggcacagaagccg

SEQ ID NO: 14099 - DNA, 23 bp, Homo sapiens
ccggggcacggcacagaagccgc

SEQ ID NO: 14100 - DNA, 23 bp, Homo sapiens
cggggcacggcacagaagccgcg

SEQ ID NO: 14101 - DNA, 23 bp, Homo sapiens
ggggcacggcacagaagccgcgc

SEQ ID NO: 14102 - DNA, 23 bp, Homo sapiens
gggcacggcacagaagccgcgcc

SEQ ID NO: 14103 - DNA, 23 bp, Homo sapiens
ggcacggcacagaagccgcgccc

SEQ ID NO: 14104 - DNA, 23 bp, Homo sapiens
gcacggcacagaagccgcgccca

SEQ ID NO: 14105 - DNA, 23 bp, Homo sapiens
cacggcacagaagccgcgcccac

SEQ ID NO: 14106 - DNA, 23 bp, Homo sapiens
acggcacagaagccgcgcccacc

SEQ ID NO: 14107 - DNA, 23 bp, Homo sapiens
cggcacagaagccgcgcccaccg

SEQ ID NO: 14108 - DNA, 23 bp, Homo sapiens
ggcacagaagccgcgcccaccgc

SEQ ID NO: 14109 - DNA, 23 bp, Homo sapiens
gcacagaagccgcgcccaccgcc

SEQ ID NO: 14110 - DNA, 23 bp, Homo sapiens
cacagaagccgcgcccaccgcct

SEQ ID NO: 14111 - DNA, 23 bp, Homo sapiens
acagaagccgcgcccaccgcctg

SEQ ID NO: 14112 - DNA, 23 bp, Homo sapiens
cagaagccgcgcccaccgcctgc

SEQ ID NO: 14113 - DNA, 23 bp, Homo sapiens
agaagccgcgcccaccgcctgcc

SEQ ID NO: 14114 - DNA, 23 bp, Homo sapiens
gaagccgcgcccaccgcctgcca

SEQ ID NO: 14115 - DNA, 23 bp, Homo sapiens
aagccgcgcccaccgcctgccag

SEQ ID NO: 14116 - DNA, 23 bp, Homo sapiens
agccgcgcccaccgcctgccagt

SEQ ID NO: 14117 - DNA, 23 bp, Homo sapiens
gccgcgcccaccgcctgccagtt

SEQ ID NO: 14118 - DNA, 23 bp, Homo sapiens
ccgcgcccaccgcctgccagttc

SEQ ID NO: 14119 - DNA, 23 bp, Homo sapiens
cgcgcccaccgcctgccagttca

SEQ ID NO: 14120 - DNA, 23 bp, Homo sapiens
gcgcccaccgcctgccagttcac

SEQ ID NO: 14121 - DNA, 23 bp, Homo sapiens
cgcccaccgcctgccagttcaca

SEQ ID NO: 14122 - DNA, 23 bp, Homo sapiens
gcccaccgcctgccagttcacaa

SEQ ID NO: 14123 - DNA, 23 bp, Homo sapiens
cccaccgcctgccagttcacaac

SEQ ID NO: 14124 - DNA, 23 bp, Homo sapiens
ccaccgcctgccagttcacaacc

SEQ ID NO: 14125 - DNA, 23 bp, Homo sapiens
caccgcctgccagttcacaaccg

SEQ ID NO: 14126 - DNA, 23 bp, Homo sapiens
accgcctgccagttcacaaccgc

SEQ ID NO: 14127 - DNA, 23 bp, Homo sapiens
ccgcctgccagttcacaaccgct

SEQ ID NO: 14128 - DNA, 23 bp, Homo sapiens
cgcctgccagttcacaaccgctc

SEQ ID NO: 14129 - DNA, 23 bp, Homo sapiens
gcctgccagttcacaaccgctcc

SEQ ID NO: 14130 - DNA, 23 bp, Homo sapiens
cctgccagttcacaaccgctccg

SEQ ID NO: 14131 - DNA, 23 bp, Homo sapiens
ctgccagttcacaaccgctccga

SEQ ID NO: 14132 - DNA, 23 bp, Homo sapiens
tgccagttcacaaccgctccgag

SEQ ID NO: 14133 - DNA, 23 bp, Homo sapiens
gccagttcacaaccgctccgagc

SEQ ID NO: 14134 - DNA, 23 bp, Homo sapiens
ccagttcacaaccgctccgagcg

SEQ ID NO: 14135 - DNA, 23 bp, Homo sapiens
cagttcacaaccgctccgagcgt

SEQ ID NO: 14136 - DNA, 23 bp, Homo sapiens
agttcacaaccgctccgagcgtg

SEQ ID NO: 14137 - DNA, 23 bp, Homo sapiens
gttcacaaccgctccgagcgtgg

SEQ ID NO: 14138 - DNA, 23 bp, Homo sapiens
ttcacaaccgctccgagcgtggg

SEQ ID NO: 14139 - DNA, 23 bp, Homo sapiens
tcacaaccgctccgagcgtgggt

SEQ ID NO: 14140 - DNA, 23 bp, Homo sapiens
cacaaccgctccgagcgtgggtc

SEQ ID NO: 14141 - DNA, 23 bp, Homo sapiens
acaaccgctccgagcgtgggtct

SEQ ID NO: 14142 - DNA, 23 bp, Homo sapiens
caaccgctccgagcgtgggtctc

SEQ ID NO: 14143 - DNA, 23 bp, Homo sapiens
aaccgctccgagcgtgggtctcc

SEQ ID NO: 14144 - DNA, 23 bp, Homo sapiens
accgctccgagcgtgggtctccg

SEQ ID NO: 14145 - DNA, 23 bp, Homo sapiens
ccgctccgagcgtgggtctccgc

SEQ ID NO: 14146 - DNA, 23 bp, Homo sapiens
cgctccgagcgtgggtctccgcc

SEQ ID NO: 14147 - DNA, 23 bp, Homo sapiens
gctccgagcgtgggtctccgccc

SEQ ID NO: 14148 - DNA, 23 bp, Homo sapiens
ctccgagcgtgggtctccgccca

SEQ ID NO: 14149 - DNA, 23 bp, Homo sapiens
tccgagcgtgggtctccgcccag

SEQ ID NO: 14150 - DNA, 23 bp, Homo sapiens
ccgagcgtgggtctccgcccagc

SEQ ID NO: 14151 - DNA, 23 bp, Homo sapiens
cgagcgtgggtctccgcccagct

SEQ ID NO: 14152 - DNA, 23 bp, Homo sapiens
gagcgtgggtctccgcccagctc

SEQ ID NO: 14153 - DNA, 23 bp, Homo sapiens
agcgtgggtctccgcccagctcc

SEQ ID NO: 14154 - DNA, 23 bp, Homo sapiens
gcgtgggtctccgcccagctcca

SEQ ID NO: 14155 - DNA, 23 bp, Homo sapiens
cgtgggtctccgcccagctccag

SEQ ID NO: 14156 - DNA, 23 bp, Homo sapiens
gtgggtctccgcccagctccagt

SEQ ID NO: 14157 - DNA, 23 bp, Homo sapiens
tgggtctccgcccagctccagtc

SEQ ID NO: 14158 - DNA, 23 bp, Homo sapiens
gggtctccgcccagctccagtcc

SEQ ID NO: 14159 - DNA, 23 bp, Homo sapiens
ggtctccgcccagctccagtcct

SEQ ID NO: 14160 - DNA, 23 bp, Homo sapiens
gtctccgcccagctccagtcctg

SEQ ID NO: 14161 - DNA, 23 bp, Homo sapiens
tctccgcccagctccagtcctgt

SEQ ID NO: 14162 - DNA, 23 bp, Homo sapiens
ctccgcccagctccagtcctgtg

SEQ ID NO: 14163 - DNA, 23 bp, Homo sapiens
tccgcccagctccagtcctgtga

SEQ ID NO: 14164 - DNA, 23 bp, Homo sapiens
ccgcccagctccagtcctgtgat

SEQ ID NO: 14165 - DNA, 23 bp, Homo sapiens
cgcccagctccagtcctgtgatc

SEQ ID NO: 14166 - DNA, 23 bp, Homo sapiens
gcccagctccagtcctgtgatcc

SEQ ID NO: 14167 - DNA, 23 bp, Homo sapiens
cccagctccagtcctgtgatccg

SEQ ID NO: 14168 - DNA, 23 bp, Homo sapiens
ccagctccagtcctgtgatccgg

SEQ ID NO: 14169 - DNA, 23 bp, Homo sapiens
cagctccagtcctgtgatccggg

SEQ ID NO: 14170 - DNA, 23 bp, Homo sapiens
agctccagtcctgtgatccgggc

SEQ ID NO: 14171 - DNA, 23 bp, Homo sapiens
gctccagtcctgtgatccgggcc

SEQ ID NO: 14172 - DNA, 23 bp, Homo sapiens
ctccagtcctgtgatccgggccc

SEQ ID NO: 14173 - DNA, 23 bp, Homo sapiens
tccagtcctgtgatccgggcccg

SEQ ID NO: 14174 - DNA, 23 bp, Homo sapiens
ccagtcctgtgatccgggcccgc

SEQ ID NO: 14175 - DNA, 23 bp, Homo sapiens
cagtcctgtgatccgggcccgcc

SEQ ID NO: 14176 - DNA, 23 bp, Homo sapiens
agtcctgtgatccgggcccgccc

SEQ ID NO: 14177 - DNA, 23 bp, Homo sapiens
gtcctgtgatccgggcccgcccc

SEQ ID NO: 14178 - DNA, 23 bp, Homo sapiens
tcctgtgatccgggcccgccccc

SEQ ID NO: 14179 - DNA, 23 bp, Homo sapiens
cctgtgatccgggcccgccccct

SEQ ID NO: 14180 - DNA, 23 bp, Homo sapiens
ctgtgatccgggcccgcccccta

SEQ ID NO: 14181 - DNA, 23 bp, Homo sapiens
tgtgatccgggcccgccccctag

SEQ ID NO: 14182 - DNA, 23 bp, Homo sapiens
gtgatccgggcccgccccctagc

SEQ ID NO: 14183 - DNA, 23 bp, Homo sapiens
tgatccgggcccgccccctagcg

SEQ ID NO: 14184 - DNA, 23 bp, Homo sapiens
gatccgggcccgccccctagcgg

SEQ ID NO: 14185 - DNA, 23 bp, Homo sapiens
atccgggcccgccccctagcggc

SEQ ID NO: 14186 - DNA, 23 bp, Homo sapiens
tccgggcccgccccctagcggcc

SEQ ID NO: 14187 - DNA, 23 bp, Homo sapiens
ccgggcccgccccctagcggccg

SEQ ID NO: 14188 - DNA, 23 bp, Homo sapiens
cgggcccgccccctagcggccgg

SEQ ID NO: 14189 - DNA, 23 bp, Homo sapiens
gggcccgccccctagcggccggg

SEQ ID NO: 14190 - DNA, 23 bp, Homo sapiens
ggcccgccccctagcggccgggg

SEQ ID NO: 14191 - DNA, 23 bp, Homo sapiens
gcccgccccctagcggccgggga

SEQ ID NO: 14192 - DNA, 23 bp, Homo sapiens
cccgccccctagcggccggggag

SEQ ID NO: 14193 - DNA, 23 bp, Homo sapiens
ccgccccctagcggccggggagg

SEQ ID NO: 14194 - DNA, 23 bp, Homo sapiens
cgccccctagcggccggggaggg

SEQ ID NO: 14195 - DNA, 23 bp, Homo sapiens
gccccctagcggccggggaggga

SEQ ID NO: 14196 - DNA, 23 bp, Homo sapiens
ccccctagcggccggggagggag

SEQ ID NO: 14197 - DNA, 23 bp, Homo sapiens
cccctagcggccggggagggagg

SEQ ID NO: 14198 - DNA, 23 bp, Homo sapiens
ccctagcggccggggagggaggg

SEQ ID NO: 14199 - DNA, 23 bp, Homo sapiens
cctagcggccggggagggagggg

SEQ ID NO: 14200 - DNA, 23 bp, Homo sapiens
ctagcggccggggagggaggggc

SEQ ID NO: 14201 - DNA, 23 bp, Homo sapiens
tagcggccggggagggaggggcc

SEQ ID NO: 14202 - DNA, 23 bp, Homo sapiens
agcggccggggagggaggggccg

SEQ ID NO: 14203 - DNA, 23 bp, Homo sapiens
gcggccggggagggaggggccgg

SEQ ID NO: 14204 - DNA, 23 bp, Homo sapiens
cggccggggagggaggggccggg

SEQ ID NO: 14205 - DNA, 23 bp, Homo sapiens
ggccggggagggaggggccgggt

SEQ ID NO: 14206 - DNA, 23 bp, Homo sapiens
gccggggagggaggggccgggtc

SEQ ID NO: 14207 - DNA, 23 bp, Homo sapiens
ccggggagggaggggccgggtcc

SEQ ID NO: 14208 - DNA, 23 bp, Homo sapiens
cggggagggaggggccgggtccg

SEQ ID NO: 14209 - DNA, 23 bp, Homo sapiens
ggggagggaggggccgggtccgc

SEQ ID NO: 14210 - DNA, 23 bp, Homo sapiens
gggagggaggggccgggtccgcg

SEQ ID NO: 14211 - DNA, 23 bp, Homo sapiens
ggagggaggggccgggtccgcgg

SEQ ID NO: 14212 - DNA, 23 bp, Homo sapiens
gagggaggggccgggtccgcggc

SEQ ID NO: 14213 - DNA, 23 bp, Homo sapiens
agggaggggccgggtccgcggcc

SEQ ID NO: 14214 - DNA, 23 bp, Homo sapiens
gggaggggccgggtccgcggccg

SEQ ID NO: 14215 - DNA, 23 bp, Homo sapiens
ggaggggccgggtccgcggccgg

SEQ ID NO: 14216 - DNA, 23 bp, Homo sapiens
gaggggccgggtccgcggccggc

SEQ ID NO: 14217 - DNA, 23 bp, Homo sapiens
aggggccgggtccgcggccggcg

SEQ ID NO: 14218 - DNA, 23 bp, Homo sapiens
ggggccgggtccgcggccggcga

SEQ ID NO: 14219 - DNA, 23 bp, Homo sapiens
gggccgggtccgcggccggcgaa

SEQ ID NO: 14220 - DNA, 23 bp, Homo sapiens
ggccgggtccgcggccggcgaac

SEQ ID NO: 14221 - DNA, 23 bp, Homo sapiens
gccgggtccgcggccggcgaacg

SEQ ID NO: 14222 - DNA, 23 bp, Homo sapiens
ccgggtccgcggccggcgaacgg

SEQ ID NO: 14223 - DNA, 23 bp, Homo sapiens
cgggtccgcggccggcgaacggg

SEQ ID NO: 14224 - DNA, 23 bp, Homo sapiens
gggtccgcggccggcgaacgggg

SEQ ID NO: 14225 - DNA, 23 bp, Homo sapiens
ggtccgcggccggcgaacggggc

SEQ ID NO: 14226 - DNA, 23 bp, Homo sapiens
gtccgcggccggcgaacggggct

SEQ ID NO: 14227 - DNA, 23 bp, Homo sapiens
tccgcggccggcgaacggggctc

SEQ ID NO: 14228 - DNA, 23 bp, Homo sapiens
ccgcggccggcgaacggggctcg

SEQ ID NO: 14229 - DNA, 23 bp, Homo sapiens
cgcggccggcgaacggggctcga

SEQ ID NO: 14230 - DNA, 23 bp, Homo sapiens
gcggccggcgaacggggctcgaa

SEQ ID NO: 14231 - DNA, 23 bp, Homo sapiens
cggccggcgaacggggctcgaag

SEQ ID NO: 14232 - DNA, 23 bp, Homo sapiens
ggccggcgaacggggctcgaagg

SEQ ID NO: 14233 - DNA, 23 bp, Homo sapiens
gccggcgaacggggctcgaaggg

SEQ ID NO: 14234 - DNA, 23 bp, Homo sapiens
ccggcgaacggggctcgaagggt

SEQ ID NO: 14235 - DNA, 23 bp, Homo sapiens
cggcgaacggggctcgaagggtc

SEQ ID NO: 14236 - DNA, 23 bp, Homo sapiens
ggcgaacggggctcgaagggtcc

SEQ ID NO: 14237 - DNA, 23 bp, Homo sapiens
gcgaacggggctcgaagggtcct

SEQ ID NO: 14238 - DNA, 23 bp, Homo sapiens
cgaacggggctcgaagggtcctt

SEQ ID NO: 14239 - DNA, 23 bp, Homo sapiens
gaacggggctcgaagggtccttg

SEQ ID NO: 14240 - DNA, 23 bp, Homo sapiens
aacggggctcgaagggtccttgt

SEQ ID NO: 14241 - DNA, 23 bp, Homo sapiens
acggggctcgaagggtccttgta

SEQ ID NO: 14242 - DNA, 23 bp, Homo sapiens
cggggctcgaagggtccttgtag

SEQ ID NO: 14243 - DNA, 23 bp, Homo sapiens
ggggctcgaagggtccttgtagc

SEQ ID NO: 14244 - DNA, 23 bp, Homo sapiens
gggctcgaagggtccttgtagcc

SEQ ID NO: 14245 - DNA, 23 bp, Homo sapiens
ggctcgaagggtccttgtagccg

SEQ ID NO: 14246 - DNA, 23 bp, Homo sapiens
gctcgaagggtccttgtagccgg

SEQ ID NO: 14247 - DNA, 23 bp, Homo sapiens
ctcgaagggtccttgtagccggg

SEQ ID NO: 14248 - DNA, 23 bp, Homo sapiens
tcgaagggtccttgtagccggga

SEQ ID NO: 14249 - DNA, 23 bp, Homo sapiens
cgaagggtccttgtagccgggaa

SEQ ID NO: 14250 - DNA, 23 bp, Homo sapiens
gaagggtccttgtagccgggaat

SEQ ID NO: 14251 - DNA, 23 bp, Homo sapiens
aagggtccttgtagccgggaatg

SEQ ID NO: 14252 - DNA, 23 bp, Homo sapiens
agggtccttgtagccgggaatgc

SEQ ID NO: 14253 - DNA, 23 bp, Homo sapiens
gggtccttgtagccgggaatgct

SEQ ID NO: 14254 - DNA, 23 bp, Homo sapiens
ggtccttgtagccgggaatgctg

SEQ ID NO: 14255 - DNA, 23 bp, Homo sapiens
gtccttgtagccgggaatgctgc

SEQ ID NO: 14256 - DNA, 23 bp, Homo sapiens
tccttgtagccgggaatgctgct

SEQ ID NO: 14257 - DNA, 23 bp, Homo sapiens
ccttgtagccgggaatgctgctg

SEQ ID NO: 14258 - DNA, 23 bp, Homo sapiens
cttgtagccgggaatgctgctgc

SEQ ID NO: 14259 - DNA, 23 bp, Homo sapiens
ttgtagccgggaatgctgctgct

SEQ ID NO: 14260 - DNA, 23 bp, Homo sapiens
tgtagccgggaatgctgctgctg

SEQ ID NO: 14261 - DNA, 23 bp, Homo sapiens
gtagccgggaatgctgctgctgc

SEQ ID NO: 14262 - DNA, 23 bp, Homo sapiens
tagccgggaatgctgctgctgct

SEQ ID NO: 14263 - DNA, 23 bp, Homo sapiens
agccgggaatgctgctgctgctg

SEQ ID NO: 14264 - DNA, 23 bp, Homo sapiens
gccgggaatgctgctgctgctgc

SEQ ID NO: 14265 - DNA, 23 bp, Homo sapiens
ccgggaatgctgctgctgctgct

SEQ ID NO: 14266 - DNA, 23 bp, Homo sapiens
cgggaatgctgctgctgctgctg

SEQ ID NO: 14267 - DNA, 23 bp, Homo sapiens
gggaatgctgctgctgctgctgc

SEQ ID NO: 14268 - DNA, 23 bp, Homo sapiens
ggaatgctgctgctgctgctgct

SEQ ID NO: 14269 - DNA, 23 bp, Homo sapiens
gaatgctgctgctgctgctgctg

SEQ ID NO: 14270 - DNA, 23 bp, Homo sapiens
aatgctgctgctgctgctgctgc

SEQ ID NO: 14271 - DNA, 23 bp, Homo sapiens
atgctgctgctgctgctgctgct

SEQ ID NO: 14272 - DNA, 23 bp, Homo sapiens
tgctgctgctgctgctgctgctg

SEQ ID NO: 14273 - DNA, 23 bp, Homo sapiens
gctgctgctgctgctgctgctgc

SEQ ID NO: 14274 - DNA, 23 bp, Homo sapiens
ctgctgctgctgctgctgctgct

SEQ ID NO: 14275 - DNA, 23 bp, Homo sapiens
gctgctgctgctgctgctgctgg

SEQ ID NO: 14276 - DNA, 23 bp, Homo sapiens
ctgctgctgctgctgctgctggg

SEQ ID NO: 14277 - DNA, 23 bp, Homo sapiens
tgctgctgctgctgctgctgggg

SEQ ID NO: 14278 - DNA, 23 bp, Homo sapiens
gctgctgctgctgctgctggggg

SEQ ID NO: 14279 - DNA, 23 bp, Homo sapiens
ctgctgctgctgctgctgggggg

SEQ ID NO: 14280 - DNA, 23 bp, Homo sapiens
tgctgctgctgctgctgggggga

SEQ ID NO: 14281 - DNA, 23 bp, Homo sapiens
gctgctgctgctgctggggggat

SEQ ID NO: 14282 - DNA, 23 bp, Homo sapiens
ctgctgctgctgctggggggatc

SEQ ID NO: 14283 - DNA, 23 bp, Homo sapiens
tgctgctgctgctggggggatca

SEQ ID NO: 14284 - DNA, 23 bp, Homo sapiens
gctgctgctgctggggggatcac

SEQ ID NO: 14285 - DNA, 23 bp, Homo sapiens
ctgctgctgctggggggatcaca

SEQ ID NO: 14286 - DNA, 23 bp, Homo sapiens
tgctgctgctggggggatcacag

SEQ ID NO: 14287 - DNA, 23 bp, Homo sapiens
gctgctgctggggggatcacaga

SEQ ID NO: 14288 - DNA, 23 bp, Homo sapiens
ctgctgctggggggatcacagac

SEQ ID NO: 14289 - DNA, 23 bp, Homo sapiens
tgctgctggggggatcacagacc

SEQ ID NO: 14290 - DNA, 23 bp, Homo sapiens
gctgctggggggatcacagacca

SEQ ID NO: 14291 - DNA, 23 bp, Homo sapiens
ctgctggggggatcacagaccat

SEQ ID NO: 14292 - DNA, 23 bp, Homo sapiens
tgctggggggatcacagaccatt

SEQ ID NO: 14293 - DNA, 23 bp, Homo sapiens
gctggggggatcacagaccattt

SEQ ID NO: 14294 - DNA, 23 bp, Homo sapiens
ctggggggatcacagaccatttc

SEQ ID NO: 14295 - DNA, 23 bp, Homo sapiens
tggggggatcacagaccatttct

SEQ ID NO: 14296 - DNA, 23 bp, Homo sapiens
ggggggatcacagaccatttctt

SEQ ID NO: 14297 - DNA, 23 bp, Homo sapiens
gggggatcacagaccatttcttt

SEQ ID NO: 14298 - DNA, 23 bp, Homo sapiens
ggggatcacagaccatttctttc

SEQ ID NO: 14299 - DNA, 23 bp, Homo sapiens
gggatcacagaccatttctttct

SEQ ID NO: 14300 - DNA, 23 bp, Homo sapiens
ggatcacagaccatttctttctt

SEQ ID NO: 14301 - DNA, 23 bp, Homo sapiens
gatcacagaccatttctttcttt

SEQ ID NO: 14302 - DNA, 23 bp, Homo sapiens
atcacagaccatttctttctttc

SEQ ID NO: 14303 - DNA, 23 bp, Homo sapiens
tcacagaccatttctttctttcg

SEQ ID NO: 14304 - DNA, 23 bp, Homo sapiens
cacagaccatttctttctttcgg

SEQ ID NO: 14305 - DNA, 23 bp, Homo sapiens
acagaccatttctttctttcggc

SEQ ID NO: 14306 - DNA, 23 bp, Homo sapiens
cagaccatttctttctttcggcc

SEQ ID NO: 14307 - DNA, 23 bp, Homo sapiens
agaccatttctttctttcggcca

SEQ ID NO: 14308 - DNA, 23 bp, Homo sapiens
gaccatttctttctttcggccag

SEQ ID NO: 14309 - DNA, 23 bp, Homo sapiens
accatttctttctttcggccagg

SEQ ID NO: 14310 - DNA, 23 bp, Homo sapiens
ccatttctttctttcggccaggc

SEQ ID NO: 14311 - DNA, 23 bp, Homo sapiens
catttctttctttcggccaggct

SEQ ID NO: 14312 - DNA, 23 bp, Homo sapiens
atttctttctttcggccaggctg

SEQ ID NO: 14313 - DNA, 23 bp, Homo sapiens
tttctttctttcggccaggctga

SEQ ID NO: 14314 - DNA, 23 bp, Homo sapiens
ttctttctttcggccaggctgag

SEQ ID NO: 14315 - DNA, 23 bp, Homo sapiens
tctttctttcggccaggctgagg

SEQ ID NO: 14316 - DNA, 23 bp, Homo sapiens
ctttctttcggccaggctgaggc

SEQ ID NO: 14317 - DNA, 23 bp, Homo sapiens
tttctttcggccaggctgaggcc

SEQ ID NO: 14318 - DNA, 23 bp, Homo sapiens
ttctttcggccaggctgaggccc

SEQ ID NO: 14319 - DNA, 23 bp, Homo sapiens
tctttcggccaggctgaggccct

SEQ ID NO: 14320 - DNA, 23 bp, Homo sapiens
ctttcggccaggctgaggccctg

SEQ ID NO: 14321 - DNA, 23 bp, Homo sapiens
tttcggccaggctgaggccctga

SEQ ID NO: 14322 - DNA, 23 bp, Homo sapiens
ttcggccaggctgaggccctgac

SEQ ID NO: 14323 - DNA, 23 bp, Homo sapiens
tcggccaggctgaggccctgacg

SEQ ID NO: 14324 - DNA, 23 bp, Homo sapiens
cggccaggctgaggccctgacgt

SEQ ID NO: 14325 - DNA, 23 bp, Homo sapiens
ggccaggctgaggccctgacgtg

SEQ ID NO: 14326 - DNA, 23 bp, Homo sapiens
gccaggctgaggccctgacgtgg

SEQ ID NO: 14327 - DNA, 23 bp, Homo sapiens
ccaggctgaggccctgacgtgga

SEQ ID NO: 14328 - DNA, 23 bp, Homo sapiens
caggctgaggccctgacgtggat

SEQ ID NO: 14329 - DNA, 23 bp, Homo sapiens
aggctgaggccctgacgtggatg

SEQ ID NO: 14330 - DNA, 23 bp, Homo sapiens
ggctgaggccctgacgtggatgg

SEQ ID NO: 14331 - DNA, 23 bp, Homo sapiens
gctgaggccctgacgtggatggg

SEQ ID NO: 14332 - DNA, 23 bp, Homo sapiens
ctgaggccctgacgtggatgggc

SEQ ID NO: 14333 - DNA, 23 bp, Homo sapiens
tgaggccctgacgtggatgggca

SEQ ID NO: 14334 - DNA, 23 bp, Homo sapiens
gaggccctgacgtggatgggcaa

SEQ ID NO: 14335 - DNA, 23 bp, Homo sapiens
aggccctgacgtggatgggcaaa

SEQ ID NO: 14336 - DNA, 23 bp, Homo sapiens
ggccctgacgtggatgggcaaac

SEQ ID NO: 14337 - DNA, 23 bp, Homo sapiens
gccctgacgtggatgggcaaact

SEQ ID NO: 14338 - DNA, 23 bp, Homo sapiens
ccctgacgtggatgggcaaactg

SEQ ID NO: 14339 - DNA, 23 bp, Homo sapiens
cctgacgtggatgggcaaactgc

SEQ ID NO: 14340 - DNA, 23 bp, Homo sapiens
ctgacgtggatgggcaaactgca

SEQ ID NO: 14341 - DNA, 23 bp, Homo sapiens
tgacgtggatgggcaaactgcag

SEQ ID NO: 14342 - DNA, 23 bp, Homo sapiens
gacgtggatgggcaaactgcagg

SEQ ID NO: 14343 - DNA, 23 bp, Homo sapiens
acgtggatgggcaaactgcaggc

SEQ ID NO: 14344 - DNA, 23 bp, Homo sapiens
cgtggatgggcaaactgcaggcc

SEQ ID NO: 14345 - DNA, 23 bp, Homo sapiens
gtggatgggcaaactgcaggcct

SEQ ID NO: 14346 - DNA, 23 bp, Homo sapiens
tggatgggcaaactgcaggcctg

SEQ ID NO: 14347 - DNA, 23 bp, Homo sapiens
ggatgggcaaactgcaggcctgg

SEQ ID NO: 14348 - DNA, 23 bp, Homo sapiens
gatgggcaaactgcaggcctggg

SEQ ID NO: 14349 - DNA, 23 bp, Homo sapiens
atgggcaaactgcaggcctggga

SEQ ID NO: 14350 - DNA, 23 bp, Homo sapiens
tgggcaaactgcaggcctgggaa

SEQ ID NO: 14351 - DNA, 23 bp, Homo sapiens
gggcaaactgcaggcctgggaag

SEQ ID NO: 14352 - DNA, 23 bp, Homo sapiens
ggcaaactgcaggcctgggaagg

SEQ ID NO: 14353 - DNA, 23 bp, Homo sapiens
gcaaactgcaggcctgggaaggc

SEQ ID NO: 14354 - DNA, 23 bp, Homo sapiens
caaactgcaggcctgggaaggca

SEQ ID NO: 14355 - DNA, 23 bp, Homo sapiens
aaactgcaggcctgggaaggcag

SEQ ID NO: 14356 - DNA, 23 bp, Homo sapiens
aactgcaggcctgggaaggcagc

SEQ ID NO: 14357 - DNA, 23 bp, Homo sapiens
actgcaggcctgggaaggcagca

SEQ ID NO: 14358 - DNA, 23 bp, Homo sapiens
ctgcaggcctgggaaggcagcaa

SEQ ID NO: 14359 - DNA, 23 bp, Homo sapiens
tgcaggcctgggaaggcagcaag

SEQ ID NO: 14360 - DNA, 23 bp, Homo sapiens
gcaggcctgggaaggcagcaagc

SEQ ID NO: 14361 - DNA, 23 bp, Homo sapiens
caggcctgggaaggcagcaagcc

SEQ ID NO: 14362 - DNA, 23 bp, Homo sapiens
aggcctgggaaggcagcaagccg

SEQ ID NO: 14363 - DNA, 23 bp, Homo sapiens
ggcctgggaaggcagcaagccgg

SEQ ID NO: 14364 - DNA, 23 bp, Homo sapiens
gcctgggaaggcagcaagccggg

SEQ ID NO: 14365 - DNA, 23 bp, Homo sapiens
cctgggaaggcagcaagccgggc

SEQ ID NO: 14366 - DNA, 23 bp, Homo sapiens
ctgggaaggcagcaagccgggcc

SEQ ID NO: 14367 - DNA, 23 bp, Homo sapiens
tgggaaggcagcaagccgggccg

SEQ ID NO: 14368 - DNA, 23 bp, Homo sapiens
gggaaggcagcaagccgggccgt

SEQ ID NO: 14369 - DNA, 23 bp, Homo sapiens
ggaaggcagcaagccgggccgtc

SEQ ID NO: 14370 - DNA, 23 bp, Homo sapiens
gaaggcagcaagccgggccgtcc

SEQ ID NO: 14371 - DNA, 23 bp, Homo sapiens
aaggcagcaagccgggccgtccg

SEQ ID NO: 14372 - DNA, 23 bp, Homo sapiens
aggcagcaagccgggccgtccgt

SEQ ID NO: 14373 - DNA, 23 bp, Homo sapiens
ggcagcaagccgggccgtccgtg

SEQ ID NO: 14374 - DNA, 23 bp, Homo sapiens
gcagcaagccgggccgtccgtgt

SEQ ID NO: 14375 - DNA, 23 bp, Homo sapiens
cagcaagccgggccgtccgtgtt

SEQ ID NO: 14376 - DNA, 23 bp, Homo sapiens
agcaagccgggccgtccgtgttc

SEQ ID NO: 14377 - DNA, 23 bp, Homo sapiens
gcaagccgggccgtccgtgttcc

SEQ ID NO: 14378 - DNA, 23 bp, Homo sapiens
caagccgggccgtccgtgttcca

SEQ ID NO: 14379 - DNA, 23 bp, Homo sapiens
aagccgggccgtccgtgttccat

SEQ ID NO: 14380 - DNA, 23 bp, Homo sapiens
agccgggccgtccgtgttccatc

SEQ ID NO: 14381 - DNA, 23 bp, Homo sapiens
gccgggccgtccgtgttccatcc

SEQ ID NO: 14382 - DNA, 23 bp, Homo sapiens
ccgggccgtccgtgttccatcct

SEQ ID NO: 14383 - DNA, 23 bp, Homo sapiens
cgggccgtccgtgttccatcctc

SEQ ID NO: 14384 - DNA, 23 bp, Homo sapiens
gggccgtccgtgttccatcctcc

SEQ ID NO: 14385 - DNA, 23 bp, Homo sapiens
ggccgtccgtgttccatcctcca

SEQ ID NO: 14386 - DNA, 23 bp, Homo sapiens
gccgtccgtgttccatcctccac

SEQ ID NO: 14387 - DNA, 23 bp, Homo sapiens
ccgtccgtgttccatcctccacg

SEQ ID NO: 14388 - DNA, 23 bp, Homo sapiens
cgtccgtgttccatcctccacgc

SEQ ID NO: 14389 - DNA, 23 bp, Homo sapiens
gtccgtgttccatcctccacgca

SEQ ID NO: 14390 - DNA, 23 bp, Homo sapiens
tccgtgttccatcctccacgcac

SEQ ID NO: 14391 - DNA, 23 bp, Homo sapiens
ccgtgttccatcctccacgcacc

SEQ ID NO: 14392 - DNA, 23 bp, Homo sapiens
cgtgttccatcctccacgcaccc

SEQ ID NO: 14393 - DNA, 23 bp, Homo sapiens
gtgttccatcctccacgcacccc

SEQ ID NO: 14394 - DNA, 23 bp, Homo sapiens
tgttccatcctccacgcaccccc

SEQ ID NO: 14395 - DNA, 23 bp, Homo sapiens
gttccatcctccacgcaccccca

SEQ ID NO: 14396 - DNA, 23 bp, Homo sapiens
ttccatcctccacgcacccccac

SEQ ID NO: 14397 - DNA, 23 bp, Homo sapiens
tccatcctccacgcacccccacc

SEQ ID NO: 14398 - DNA, 23 bp, Homo sapiens
ccatcctccacgcacccccacct

SEQ ID NO: 14399 - DNA, 23 bp, Homo sapiens
catcctccacgcacccccaccta

SEQ ID NO: 14400 - DNA, 23 bp, Homo sapiens
atcctccacgcacccccacctat

SEQ ID NO: 14401 - DNA, 23 bp, Homo sapiens
tcctccacgcacccccacctatc

SEQ ID NO: 14402 - DNA, 23 bp, Homo sapiens
cctccacgcacccccacctatcg

SEQ ID NO: 14403 - DNA, 23 bp, Homo sapiens
ctccacgcacccccacctatcgt

SEQ ID NO: 14404 - DNA, 23 bp, Homo sapiens
tccacgcacccccacctatcgtt

SEQ ID NO: 14405 - DNA, 23 bp, Homo sapiens
ccacgcacccccacctatcgttg

SEQ ID NO: 14406 - DNA, 23 bp, Homo sapiens
cacgcacccccacctatcgttgg

SEQ ID NO: 14407 - DNA, 23 bp, Homo sapiens
acgcacccccacctatcgttggt

SEQ ID NO: 14408 - DNA, 23 bp, Homo sapiens
cgcacccccacctatcgttggtt

SEQ ID NO: 14409 - DNA, 23 bp, Homo sapiens
gcacccccacctatcgttggttc

SEQ ID NO: 14410 - DNA, 23 bp, Homo sapiens
cacccccacctatcgttggttcg

SEQ ID NO: 14411 - DNA, 23 bp, Homo sapiens
acccccacctatcgttggttcgc

SEQ ID NO: 14412 - DNA, 23 bp, Homo sapiens
cccccacctatcgttggttcgca

SEQ ID NO: 14413 - DNA, 23 bp, Homo sapiens
ccccacctatcgttggttcgcaa

SEQ ID NO: 14414 - DNA, 23 bp, Homo sapiens
cccacctatcgttggttcgcaaa

SEQ ID NO: 14415 - DNA, 23 bp, Homo sapiens
ccacctatcgttggttcgcaaag

SEQ ID NO: 14416 - DNA, 23 bp, Homo sapiens
cacctatcgttggttcgcaaagt

SEQ ID NO: 14417 - DNA, 23 bp, Homo sapiens
acctatcgttggttcgcaaagtg

SEQ ID NO: 14418 - DNA, 23 bp, Homo sapiens
cctatcgttggttcgcaaagtgc

SEQ ID NO: 14419 - DNA, 23 bp, Homo sapiens
ctatcgttggttcgcaaagtgca

SEQ ID NO: 14420 - DNA, 23 bp, Homo sapiens
tatcgttggttcgcaaagtgcaa

SEQ ID NO: 14421 - DNA, 23 bp, Homo sapiens
atcgttggttcgcaaagtgcaaa

SEQ ID NO: 14422 - DNA, 23 bp, Homo sapiens
tcgttggttcgcaaagtgcaaag

SEQ ID NO: 14423 - DNA, 23 bp, Homo sapiens
cgttggttcgcaaagtgcaaagc

SEQ ID NO: 14424 - DNA, 23 bp, Homo sapiens
gttggttcgcaaagtgcaaagct

SEQ ID NO: 14425 - DNA, 23 bp, Homo sapiens
ttggttcgcaaagtgcaaagctt

SEQ ID NO: 14426 - DNA, 23 bp, Homo sapiens
tggttcgcaaagtgcaaagcttt

SEQ ID NO: 14427 - DNA, 23 bp, Homo sapiens
ggttcgcaaagtgcaaagctttc

SEQ ID NO: 14428 - DNA, 23 bp, Homo sapiens
gttcgcaaagtgcaaagctttct

SEQ ID NO: 14429 - DNA, 23 bp, Homo sapiens
ttcgcaaagtgcaaagctttctt

SEQ ID NO: 14430 - DNA, 23 bp, Homo sapiens
tcgcaaagtgcaaagctttcttg

SEQ ID NO: 14431 - DNA, 23 bp, Homo sapiens
cgcaaagtgcaaagctttcttgt

SEQ ID NO: 14432 - DNA, 23 bp, Homo sapiens
gcaaagtgcaaagctttcttgtg

SEQ ID NO: 14433 - DNA, 23 bp, Homo sapiens
caaagtgcaaagctttcttgtgc

SEQ ID NO: 14434 - DNA, 23 bp, Homo sapiens
aaagtgcaaagctttcttgtgca

SEQ ID NO: 14435 - DNA, 23 bp, Homo sapiens
aagtgcaaagctttcttgtgcat

SEQ ID NO: 14436 - DNA, 23 bp, Homo sapiens
agtgcaaagctttcttgtgcatg

SEQ ID NO: 14437 - DNA, 23 bp, Homo sapiens
gtgcaaagctttcttgtgcatga

SEQ ID NO: 14438 - DNA, 23 bp, Homo sapiens
tgcaaagctttcttgtgcatgac

SEQ ID NO: 14439 - DNA, 23 bp, Homo sapiens
gcaaagctttcttgtgcatgacg

SEQ ID NO: 14440 - DNA, 23 bp, Homo sapiens
caaagctttcttgtgcatgacgc

SEQ ID NO: 14441 - DNA, 23 bp, Homo sapiens
aaagctttcttgtgcatgacgcc

SEQ ID NO: 14442 - DNA, 23 bp, Homo sapiens
aagctttcttgtgcatgacgccc

SEQ ID NO: 14443 - DNA, 23 bp, Homo sapiens
agctttcttgtgcatgacgccct

SEQ ID NO: 14444 - DNA, 23 bp, Homo sapiens
gctttcttgtgcatgacgccctg

SEQ ID NO: 14445 - DNA, 23 bp, Homo sapiens
ctttcttgtgcatgacgccctgc

SEQ ID NO: 14446 - DNA, 23 bp, Homo sapiens
tttcttgtgcatgacgccctgct

SEQ ID NO: 14447 - DNA, 23 bp, Homo sapiens
ttcttgtgcatgacgccctgctc

SEQ ID NO: 14448 - DNA, 23 bp, Homo sapiens
tcttgtgcatgacgccctgctct

SEQ ID NO: 14449 - DNA, 23 bp, Homo sapiens
cttgtgcatgacgccctgctctg

SEQ ID NO: 14450 - DNA, 23 bp, Homo sapiens
ttgtgcatgacgccctgctctgg

SEQ ID NO: 14451 - DNA, 23 bp, Homo sapiens
tgtgcatgacgccctgctctggg

SEQ ID NO: 14452 - DNA, 23 bp, Homo sapiens
gtgcatgacgccctgctctgggg

SEQ ID NO: 14453 - DNA, 23 bp, Homo sapiens
tgcatgacgccctgctctgggga

SEQ ID NO: 14454 - DNA, 23 bp, Homo sapiens
gcatgacgccctgctctggggag

SEQ ID NO: 14455 - DNA, 23 bp, Homo sapiens
catgacgccctgctctggggagc

SEQ ID NO: 14456 - DNA, 23 bp, Homo sapiens
atgacgccctgctctggggagcg

SEQ ID NO: 14457 - DNA, 23 bp, Homo sapiens
tgacgccctgctctggggagcgt

SEQ ID NO: 14458 - DNA, 23 bp, Homo sapiens
gacgccctgctctggggagcgtc

SEQ ID NO: 14459 - DNA, 23 bp, Homo sapiens
acgccctgctctggggagcgtct

SEQ ID NO: 14460 - DNA, 23 bp, Homo sapiens
cgccctgctctggggagcgtctg

SEQ ID NO: 14461 - DNA, 23 bp, Homo sapiens
gccctgctctggggagcgtctgg

SEQ ID NO: 14462 - DNA, 23 bp, Homo sapiens
ccctgctctggggagcgtctggc

SEQ ID NO: 14463 - DNA, 23 bp, Homo sapiens
cctgctctggggagcgtctggcg

SEQ ID NO: 14464 - DNA, 23 bp, Homo sapiens
ctgctctggggagcgtctggcgc

SEQ ID NO: 14465 - DNA, 23 bp, Homo sapiens
tgctctggggagcgtctggcgcg

SEQ ID NO: 14466 - DNA, 23 bp, Homo sapiens
gctctggggagcgtctggcgcga

SEQ ID NO: 14467 - DNA, 23 bp, Homo sapiens
ctctggggagcgtctggcgcgat

SEQ ID NO: 14468 - DNA, 23 bp, Homo sapiens
tctggggagcgtctggcgcgatc

SEQ ID NO: 14469 - DNA, 23 bp, Homo sapiens
ctggggagcgtctggcgcgatct

SEQ ID NO: 14470 - DNA, 23 bp, Homo sapiens
tggggagcgtctggcgcgatctc

SEQ ID NO: 14471 - DNA, 23 bp, Homo sapiens
ggggagcgtctggcgcgatctct

SEQ ID NO: 14472 - DNA, 23 bp, Homo sapiens
gggagcgtctggcgcgatctctg

SEQ ID NO: 14473 - DNA, 23 bp, Homo sapiens
ggagcgtctggcgcgatctctgc

SEQ ID NO: 14474 - DNA, 23 bp, Homo sapiens
gagcgtctggcgcgatctctgcc

SEQ ID NO: 14475 - DNA, 23 bp, Homo sapiens
agcgtctggcgcgatctctgcct

SEQ ID NO: 14476 - DNA, 23 bp, Homo sapiens
gcgtctggcgcgatctctgcctg

SEQ ID NO: 14477 - DNA, 23 bp, Homo sapiens
cgtctggcgcgatctctgcctgc

SEQ ID NO: 14478 - DNA, 23 bp, Homo sapiens
gtctggcgcgatctctgcctgct

SEQ ID NO: 14479 - DNA, 23 bp, Homo sapiens
tctggcgcgatctctgcctgctt

SEQ ID NO: 14480 - DNA, 23 bp, Homo sapiens
ctggcgcgatctctgcctgctta

SEQ ID NO: 14481 - DNA, 23 bp, Homo sapiens
tggcgcgatctctgcctgcttac

SEQ ID NO: 14482 - DNA, 23 bp, Homo sapiens
ggcgcgatctctgcctgcttact

SEQ ID NO: 14483 - DNA, 23 bp, Homo sapiens
gcgcgatctctgcctgcttactc

SEQ ID NO: 14484 - DNA, 23 bp, Homo sapiens
cgcgatctctgcctgcttactcg

SEQ ID NO: 14485 - DNA, 23 bp, Homo sapiens
gcgatctctgcctgcttactcgg

SEQ ID NO: 14486 - DNA, 23 bp, Homo sapiens
cgatctctgcctgcttactcggg

SEQ ID NO: 14487 - DNA, 23 bp, Homo sapiens
gatctctgcctgcttactcggga

SEQ ID NO: 14488 - DNA, 23 bp, Homo sapiens
atctctgcctgcttactcgggaa

SEQ ID NO: 14489 - DNA, 23 bp, Homo sapiens
tctctgcctgcttactcgggaaa

SEQ ID NO: 14490 - DNA, 23 bp, Homo sapiens
ctctgcctgcttactcgggaaat

SEQ ID NO: 14491 - DNA, 23 bp, Homo sapiens
tctgcctgcttactcgggaaatt

SEQ ID NO: 14492 - DNA, 23 bp, Homo sapiens
ctgcctgcttactcgggaaattt

SEQ ID NO: 14493 - DNA, 23 bp, Homo sapiens
tgcctgcttactcgggaaatttg

SEQ ID NO: 14494 - DNA, 23 bp, Homo sapiens
gcctgcttactcgggaaatttgc

SEQ ID NO: 14495 - DNA, 23 bp, Homo sapiens
cctgcttactcgggaaatttgct

SEQ ID NO: 14496 - DNA, 23 bp, Homo sapiens
ctgcttactcgggaaatttgctt

SEQ ID NO: 14497 - DNA, 23 bp, Homo sapiens
tgcttactcgggaaatttgcttt

SEQ ID NO: 14498 - DNA, 23 bp, Homo sapiens
gcttactcgggaaatttgctttt

SEQ ID NO: 14499 - DNA, 23 bp, Homo sapiens
cttactcgggaaatttgcttttg

SEQ ID NO: 14500 - DNA, 23 bp, Homo sapiens
ttactcgggaaatttgcttttgc

SEQ ID NO: 14501 - DNA, 23 bp, Homo sapiens
tactcgggaaatttgcttttgcc

SEQ ID NO: 14502 - DNA, 23 bp, Homo sapiens
actcgggaaatttgcttttgcca

SEQ ID NO: 14503 - DNA, 23 bp, Homo sapiens
ctcgggaaatttgcttttgccaa

SEQ ID NO: 14504 - DNA, 23 bp, Homo sapiens
tcgggaaatttgcttttgccaaa

SEQ ID NO: 14505 - DNA, 23 bp, Homo sapiens
cgggaaatttgcttttgccaaac

SEQ ID NO: 14506 - DNA, 23 bp, Homo sapiens
gggaaatttgcttttgccaaacc

SEQ ID NO: 14507 - DNA, 23 bp, Homo sapiens
ggaaatttgcttttgccaaaccc

SEQ ID NO: 14508 - DNA, 23 bp, Homo sapiens
gaaatttgcttttgccaaacccg

SEQ ID NO: 14509 - DNA, 23 bp, Homo sapiens
aaatttgcttttgccaaacccgc

SEQ ID NO: 14510 - DNA, 23 bp, Homo sapiens
aatttgcttttgccaaacccgct

SEQ ID NO: 14511 - DNA, 23 bp, Homo sapiens
atttgcttttgccaaacccgctt

SEQ ID NO: 14512 - DNA, 23 bp, Homo sapiens
tttgcttttgccaaacccgcttt

SEQ ID NO: 14513 - DNA, 23 bp, Homo sapiens
ttgcttttgccaaacccgctttt

SEQ ID NO: 14514 - DNA, 23 bp, Homo sapiens
tgcttttgccaaacccgcttttt

SEQ ID NO: 14515 - DNA, 23 bp, Homo sapiens
gcttttgccaaacccgctttttc

SEQ ID NO: 14516 - DNA, 23 bp, Homo sapiens
cttttgccaaacccgctttttcg

SEQ ID NO: 14517 - DNA, 23 bp, Homo sapiens
ttttgccaaacccgctttttcgg

SEQ ID NO: 14518 - DNA, 23 bp, Homo sapiens
tttgccaaacccgctttttcggg

SEQ ID NO: 14519 - DNA, 23 bp, Homo sapiens
ttgccaaacccgctttttcgggg

SEQ ID NO: 14520 - DNA, 23 bp, Homo sapiens
tgccaaacccgctttttcgggga

SEQ ID NO: 14521 - DNA, 23 bp, Homo sapiens
gccaaacccgctttttcggggat

SEQ ID NO: 14522 - DNA, 23 bp, Homo sapiens
ccaaacccgctttttcggggatc

SEQ ID NO: 14523 - DNA, 23 bp, Homo sapiens
caaacccgctttttcggggatcc

SEQ ID NO: 14524 - DNA, 23 bp, Homo sapiens
aaacccgctttttcggggatccc

SEQ ID NO: 14525 - DNA, 23 bp, Homo sapiens
aacccgctttttcggggatcccg

SEQ ID NO: 14526 - DNA, 23 bp, Homo sapiens
acccgctttttcggggatcccgc

SEQ ID NO: 14527 - DNA, 23 bp, Homo sapiens
cccgctttttcggggatcccgcg

SEQ ID NO: 14528 - DNA, 23 bp, Homo sapiens
ccgctttttcggggatcccgcgc

SEQ ID NO: 14529 - DNA, 23 bp, Homo sapiens
cgctttttcggggatcccgcgcc

SEQ ID NO: 14530 - DNA, 23 bp, Homo sapiens
gctttttcggggatcccgcgccc

SEQ ID NO: 14531 - DNA, 23 bp, Homo sapiens
ctttttcggggatcccgcgcccc

SEQ ID NO: 14532 - DNA, 23 bp, Homo sapiens
tttttcggggatcccgcgccccc

SEQ ID NO: 14533 - DNA, 23 bp, Homo sapiens
ttttcggggatcccgcgcccccc

SEQ ID NO: 14534 - DNA, 23 bp, Homo sapiens
tttcggggatcccgcgcccccct

SEQ ID NO: 14535 - DNA, 23 bp, Homo sapiens
ttcggggatcccgcgcccccctc

SEQ ID NO: 14536 - DNA, 23 bp, Homo sapiens
tcggggatcccgcgcccccctcc

SEQ ID NO: 14537 - DNA, 23 bp, Homo sapiens
cggggatcccgcgcccccctcct

SEQ ID NO: 14538 - DNA, 23 bp, Homo sapiens
ggggatcccgcgcccccctcctc

SEQ ID NO: 14539 - DNA, 23 bp, Homo sapiens
gggatcccgcgcccccctcctca

SEQ ID NO: 14540 - DNA, 23 bp, Homo sapiens
ggatcccgcgcccccctcctcac

SEQ ID NO: 14541 - DNA, 23 bp, Homo sapiens
gatcccgcgcccccctcctcact

SEQ ID NO: 14542 - DNA, 23 bp, Homo sapiens
atcccgcgcccccctcctcactt

SEQ ID NO: 14543 - DNA, 23 bp, Homo sapiens
tcccgcgcccccctcctcacttg

SEQ ID NO: 14544 - DNA, 23 bp, Homo sapiens
cccgcgcccccctcctcacttgc

SEQ ID NO: 14545 - DNA, 23 bp, Homo sapiens
ccgcgcccccctcctcacttgcg

SEQ ID NO: 14546 - DNA, 23 bp, Homo sapiens
cgcgcccccctcctcacttgcgc

SEQ ID NO: 14547 - DNA, 23 bp, Homo sapiens
gcgcccccctcctcacttgcgct

SEQ ID NO: 14548 - DNA, 23 bp, Homo sapiens
cgcccccctcctcacttgcgctg

SEQ ID NO: 14549 - DNA, 23 bp, Homo sapiens
gcccccctcctcacttgcgctgc

SEQ ID NO: 14550 - DNA, 23 bp, Homo sapiens
cccccctcctcacttgcgctgct

SEQ ID NO: 14551 - DNA, 23 bp, Homo sapiens
ccccctcctcacttgcgctgctc

SEQ ID NO: 14552 - DNA, 23 bp, Homo sapiens
cccctcctcacttgcgctgctct

SEQ ID NO: 14553 - DNA, 23 bp, Homo sapiens
ccctcctcacttgcgctgctctc

SEQ ID NO: 14554 - DNA, 23 bp, Homo sapiens
cctcctcacttgcgctgctctcg

SEQ ID NO: 14555 - DNA, 23 bp, Homo sapiens
ctcctcacttgcgctgctctcgg

SEQ ID NO: 14556 - DNA, 23 bp, Homo sapiens
tcctcacttgcgctgctctcgga

SEQ ID NO: 14557 - DNA, 23 bp, Homo sapiens
cctcacttgcgctgctctcggag

SEQ ID NO: 14558 - DNA, 23 bp, Homo sapiens
ctcacttgcgctgctctcggagc

SEQ ID NO: 14559 - DNA, 23 bp, Homo sapiens
tcacttgcgctgctctcggagcc

SEQ ID NO: 14560 - DNA, 23 bp, Homo sapiens
cacttgcgctgctctcggagccc

SEQ ID NO: 14561 - DNA, 23 bp, Homo sapiens
acttgcgctgctctcggagcccc

SEQ ID NO: 14562 - DNA, 23 bp, Homo sapiens
cttgcgctgctctcggagcccca

SEQ ID NO: 14563 - DNA, 23 bp, Homo sapiens
ttgcgctgctctcggagccccag

SEQ ID NO: 14564 - DNA, 23 bp, Homo sapiens
tgcgctgctctcggagccccagc

SEQ ID NO: 14565 - DNA, 23 bp, Homo sapiens
gcgctgctctcggagccccagcc

SEQ ID NO: 14566 - DNA, 23 bp, Homo sapiens
cgctgctctcggagccccagccg

SEQ ID NO: 14567 - DNA, 23 bp, Homo sapiens
gctgctctcggagccccagccgg

SEQ ID NO: 14568 - DNA, 23 bp, Homo sapiens
ctgctctcggagccccagccggc

SEQ ID NO: 14569 - DNA, 23 bp, Homo sapiens
tgctctcggagccccagccggct

SEQ ID NO: 14570 - DNA, 23 bp, Homo sapiens
gctctcggagccccagccggctc

SEQ ID NO: 14571 - DNA, 23 bp, Homo sapiens
ctctcggagccccagccggctcc

SEQ ID NO: 14572 - DNA, 23 bp, Homo sapiens
tctcggagccccagccggctccg

SEQ ID NO: 14573 - DNA, 23 bp, Homo sapiens
ctcggagccccagccggctccgc

SEQ ID NO: 14574 - DNA, 23 bp, Homo sapiens
tcggagccccagccggctccgcc

SEQ ID NO: 14575 - DNA, 23 bp, Homo sapiens
cggagccccagccggctccgccc

SEQ ID NO: 14576 - DNA, 23 bp, Homo sapiens
ggagccccagccggctccgcccg

SEQ ID NO: 14577 - DNA, 23 bp, Homo sapiens
gagccccagccggctccgcccgc

SEQ ID NO: 14578 - DNA, 23 bp, Homo sapiens
agccccagccggctccgcccgct

SEQ ID NO: 14579 - DNA, 23 bp, Homo sapiens
gccccagccggctccgcccgctt

SEQ ID NO: 14580 - DNA, 23 bp, Homo sapiens
ccccagccggctccgcccgcttc

SEQ ID NO: 14581 - DNA, 23 bp, Homo sapiens
cccagccggctccgcccgcttcg

SEQ ID NO: 14582 - DNA, 23 bp, Homo sapiens
ccagccggctccgcccgcttcgg

SEQ ID NO: 14583 - DNA, 23 bp, Homo sapiens
cagccggctccgcccgcttcggc

SEQ ID NO: 14584 - DNA, 23 bp, Homo sapiens
agccggctccgcccgcttcggcg

SEQ ID NO: 14585 - DNA, 23 bp, Homo sapiens
gccggctccgcccgcttcggcgg

SEQ ID NO: 14586 - DNA, 23 bp, Homo sapiens
ccggctccgcccgcttcggcggt

SEQ ID NO: 14587 - DNA, 23 bp, Homo sapiens
cggctccgcccgcttcggcggtt

SEQ ID NO: 14588 - DNA, 23 bp, Homo sapiens
ggctccgcccgcttcggcggttt

SEQ ID NO: 14589 - DNA, 23 bp, Homo sapiens
gctccgcccgcttcggcggtttg

SEQ ID NO: 14590 - DNA, 23 bp, Homo sapiens
ctccgcccgcttcggcggtttgg

SEQ ID NO: 14591 - DNA, 23 bp, Homo sapiens
tccgcccgcttcggcggtttgga

SEQ ID NO: 14592 - DNA, 23 bp, Homo sapiens
ccgcccgcttcggcggtttggat

SEQ ID NO: 14593 - DNA, 23 bp, Homo sapiens
cgcccgcttcggcggtttggata

SEQ ID NO: 14594 - DNA, 23 bp, Homo sapiens
gcccgcttcggcggtttggatat

SEQ ID NO: 14595 - DNA, 23 bp, Homo sapiens
cccgcttcggcggtttggatatt

SEQ ID NO: 14596 - DNA, 23 bp, Homo sapiens
ccgcttcggcggtttggatattt

SEQ ID NO: 14597 - DNA, 23 bp, Homo sapiens
cgcttcggcggtttggatattta

SEQ ID NO: 14598 - DNA, 23 bp, Homo sapiens
gcttcggcggtttggatatttat

SEQ ID NO: 14599 - DNA, 23 bp, Homo sapiens
cttcggcggtttggatatttatt

SEQ ID NO: 14600 - DNA, 23 bp, Homo sapiens
ttcggcggtttggatatttattg

SEQ ID NO: 14601 - DNA, 23 bp, Homo sapiens
tcggcggtttggatatttattga

SEQ ID NO: 14602 - DNA, 23 bp, Homo sapiens
cggcggtttggatatttattgac

SEQ ID NO: 14603 - DNA, 23 bp, Homo sapiens
ggcggtttggatatttattgacc

SEQ ID NO: 14604 - DNA, 23 bp, Homo sapiens
gcggtttggatatttattgacct

SEQ ID NO: 14605 - DNA, 23 bp, Homo sapiens
cggtttggatatttattgacctc

SEQ ID NO: 14606 - DNA, 23 bp, Homo sapiens
ggtttggatatttattgacctcg

SEQ ID NO: 14607 - DNA, 23 bp, Homo sapiens
gtttggatatttattgacctcgt

SEQ ID NO: 14608 - DNA, 23 bp, Homo sapiens
tttggatatttattgacctcgtc

SEQ ID NO: 14609 - DNA, 23 bp, Homo sapiens
ttggatatttattgacctcgtcc

SEQ ID NO: 14610 - DNA, 23 bp, Homo sapiens
tggatatttattgacctcgtcct

SEQ ID NO: 14611 - DNA, 23 bp, Homo sapiens
ggatatttattgacctcgtcctc

SEQ ID NO: 14612 - DNA, 23 bp, Homo sapiens
gatatttattgacctcgtcctcc

SEQ ID NO: 14613 - DNA, 23 bp, Homo sapiens
atatttattgacctcgtcctccg

SEQ ID NO: 14614 - DNA, 23 bp, Homo sapiens
tatttattgacctcgtcctccga

SEQ ID NO: 14615 - DNA, 23 bp, Homo sapiens
atttattgacctcgtcctccgac

SEQ ID NO: 14616 - DNA, 23 bp, Homo sapiens
tttattgacctcgtcctccgact

SEQ ID NO: 14617 - DNA, 23 bp, Homo sapiens
ttattgacctcgtcctccgactc

SEQ ID NO: 14618 - DNA, 23 bp, Homo sapiens
tattgacctcgtcctccgactcg

SEQ ID NO: 14619 - DNA, 23 bp, Homo sapiens
attgacctcgtcctccgactcgc

SEQ ID NO: 14620 - DNA, 23 bp, Homo sapiens
ttgacctcgtcctccgactcgct

SEQ ID NO: 14621 - DNA, 23 bp, Homo sapiens
tgacctcgtcctccgactcgctg

SEQ ID NO: 14622 - DNA, 23 bp, Homo sapiens
gacctcgtcctccgactcgctga

SEQ ID NO: 14623 - DNA, 23 bp, Homo sapiens
acctcgtcctccgactcgctgac

SEQ ID NO: 14624 - DNA, 23 bp, Homo sapiens
cctcgtcctccgactcgctgaca

SEQ ID NO: 14625 - DNA, 23 bp, Homo sapiens
ctcgtcctccgactcgctgacag

SEQ ID NO: 14626 - DNA, 23 bp, Homo sapiens
tcgtcctccgactcgctgacagg

SEQ ID NO: 14627 - DNA, 23 bp, Homo sapiens
cgtcctccgactcgctgacaggc

SEQ ID NO: 14628 - DNA, 23 bp, Homo sapiens
gtcctccgactcgctgacaggct

SEQ ID NO: 14629 - DNA, 23 bp, Homo sapiens
tcctccgactcgctgacaggcta

SEQ ID NO: 14630 - DNA, 23 bp, Homo sapiens
cctccgactcgctgacaggctac

SEQ ID NO: 14631 - DNA, 23 bp, Homo sapiens
ctccgactcgctgacaggctaca

SEQ ID NO: 14632 - DNA, 23 bp, Homo sapiens
tccgactcgctgacaggctacag

SEQ ID NO: 14633 - DNA, 23 bp, Homo sapiens
ccgactcgctgacaggctacagg

SEQ ID NO: 14634 - DNA, 23 bp, Homo sapiens
cgactcgctgacaggctacagga

SEQ ID NO: 14635 - DNA, 23 bp, Homo sapiens
gactcgctgacaggctacaggac

SEQ ID NO: 14636 - DNA, 23 bp, Homo sapiens
actcgctgacaggctacaggacc

SEQ ID NO: 14637 - DNA, 23 bp, Homo sapiens
ctcgctgacaggctacaggaccc

SEQ ID NO: 14638 - DNA, 23 bp, Homo sapiens
tcgctgacaggctacaggacccc

SEQ ID NO: 14639 - DNA, 23 bp, Homo sapiens
cgctgacaggctacaggaccccc

SEQ ID NO: 14640 - DNA, 23 bp, Homo sapiens
gctgacaggctacaggaccccca

SEQ ID NO: 14641 - DNA, 23 bp, Homo sapiens
ctgacaggctacaggacccccaa

SEQ ID NO: 14642 - DNA, 23 bp, Homo sapiens
tgacaggctacaggacccccaac

SEQ ID NO: 14643 - DNA, 23 bp, Homo sapiens
gacaggctacaggacccccaaca

SEQ ID NO: 14644 - DNA, 23 bp, Homo sapiens
acaggctacaggacccccaacaa

SEQ ID NO: 14645 - DNA, 23 bp, Homo sapiens
caggctacaggacccccaacaac

SEQ ID NO: 14646 - DNA, 23 bp, Homo sapiens
aggctacaggacccccaacaacc

SEQ ID NO: 14647 - DNA, 23 bp, Homo sapiens
ggctacaggacccccaacaaccc

SEQ ID NO: 14648 - DNA, 23 bp, Homo sapiens
gctacaggacccccaacaacccc

SEQ ID NO: 14649 - DNA, 23 bp, Homo sapiens
ctacaggacccccaacaacccca

SEQ ID NO: 14650 - DNA, 23 bp, Homo sapiens
tacaggacccccaacaaccccaa

SEQ ID NO: 14651 - DNA, 23 bp, Homo sapiens
acaggacccccaacaaccccaat

SEQ ID NO: 14652 - DNA, 23 bp, Homo sapiens
caggacccccaacaaccccaatc

SEQ ID NO: 14653 - DNA, 23 bp, Homo sapiens
aggacccccaacaaccccaatcc

SEQ ID NO: 14654 - DNA, 23 bp, Homo sapiens
ggacccccaacaaccccaatcca

SEQ ID NO: 14655 - DNA, 23 bp, Homo sapiens
gacccccaacaaccccaatccac

SEQ ID NO: 14656 - DNA, 23 bp, Homo sapiens
acccccaacaaccccaatccacg

SEQ ID NO: 14657 - DNA, 23 bp, Homo sapiens
cccccaacaaccccaatccacgt

SEQ ID NO: 14658 - DNA, 23 bp, Homo sapiens
ccccaacaaccccaatccacgtt

SEQ ID NO: 14659 - DNA, 23 bp, Homo sapiens
cccaacaaccccaatccacgttt

SEQ ID NO: 14660 - DNA, 23 bp, Homo sapiens
ccaacaaccccaatccacgtttt

SEQ ID NO: 14661 - DNA, 23 bp, Homo sapiens
caacaaccccaatccacgttttg

SEQ ID NO: 14662 - DNA, 23 bp, Homo sapiens
aacaaccccaatccacgttttgg

SEQ ID NO: 14663 - DNA, 23 bp, Homo sapiens
acaaccccaatccacgttttgga

SEQ ID NO: 14664 - DNA, 23 bp, Homo sapiens
caaccccaatccacgttttggat

SEQ ID NO: 14665 - DNA, 23 bp, Homo sapiens
aaccccaatccacgttttggatg

SEQ ID NO: 14666 - DNA, 23 bp, Homo sapiens
accccaatccacgttttggatgc

SEQ ID NO: 14667 - DNA, 23 bp, Homo sapiens
ccccaatccacgttttggatgca

SEQ ID NO: 14668 - DNA, 23 bp, Homo sapiens
cccaatccacgttttggatgcac

SEQ ID NO: 14669 - DNA, 23 bp, Homo sapiens
ccaatccacgttttggatgcact

SEQ ID NO: 14670 - DNA, 23 bp, Homo sapiens
caatccacgttttggatgcactg

SEQ ID NO: 14671 - DNA, 23 bp, Homo sapiens
aatccacgttttggatgcactga

SEQ ID NO: 14672 - DNA, 23 bp, Homo sapiens
atccacgttttggatgcactgag

SEQ ID NO: 14673 - DNA, 23 bp, Homo sapiens
tccacgttttggatgcactgaga

SEQ ID NO: 14674 - DNA, 23 bp, Homo sapiens
ccacgttttggatgcactgagac

SEQ ID NO: 14675 - DNA, 23 bp, Homo sapiens
cacgttttggatgcactgagacc

SEQ ID NO: 14676 - DNA, 23 bp, Homo sapiens
acgttttggatgcactgagaccc

SEQ ID NO: 14677 - DNA, 23 bp, Homo sapiens
cgttttggatgcactgagacccc

SEQ ID NO: 14678 - DNA, 23 bp, Homo sapiens
gttttggatgcactgagaccccg

SEQ ID NO: 14679 - DNA, 23 bp, Homo sapiens
ttttggatgcactgagaccccga

SEQ ID NO: 14680 - DNA, 23 bp, Homo sapiens
tttggatgcactgagaccccgac

SEQ ID NO: 14681 - DNA, 23 bp, Homo sapiens
ttggatgcactgagaccccgaca

SEQ ID NO: 14682 - DNA, 23 bp, Homo sapiens
tggatgcactgagaccccgacat

SEQ ID NO: 14683 - DNA, 23 bp, Homo sapiens
ggatgcactgagaccccgacatt

SEQ ID NO: 14684 - DNA, 23 bp, Homo sapiens
gatgcactgagaccccgacattc

SEQ ID NO: 14685 - DNA, 23 bp, Homo sapiens
atgcactgagaccccgacattcc

SEQ ID NO: 14686 - DNA, 23 bp, Homo sapiens
tgcactgagaccccgacattcct

SEQ ID NO: 14687 - DNA, 23 bp, Homo sapiens
gcactgagaccccgacattcctc

SEQ ID NO: 14688 - DNA, 23 bp, Homo sapiens
cactgagaccccgacattcctcg

SEQ ID NO: 14689 - DNA, 23 bp, Homo sapiens
actgagaccccgacattcctcgg

SEQ ID NO: 14690 - DNA, 23 bp, Homo sapiens
ctgagaccccgacattcctcggt

SEQ ID NO: 14691 - DNA, 23 bp, Homo sapiens
tgagaccccgacattcctcggta

SEQ ID NO: 14692 - DNA, 23 bp, Homo sapiens
gagaccccgacattcctcggtat

SEQ ID NO: 14693 - DNA, 23 bp, Homo sapiens
agaccccgacattcctcggtatt

SEQ ID NO: 14694 - DNA, 23 bp, Homo sapiens
gaccccgacattcctcggtattt

SEQ ID NO: 14695 - DNA, 23 bp, Homo sapiens
accccgacattcctcggtattta

SEQ ID NO: 14696 - DNA, 23 bp, Homo sapiens
ccccgacattcctcggtatttat

SEQ ID NO: 14697 - DNA, 23 bp, Homo sapiens
cccgacattcctcggtatttatt

SEQ ID NO: 14698 - DNA, 23 bp, Homo sapiens
ccgacattcctcggtatttattg

SEQ ID NO: 14699 - DNA, 23 bp, Homo sapiens
cgacattcctcggtatttattgt

SEQ ID NO: 14700 - DNA, 23 bp, Homo sapiens
gacattcctcggtatttattgtc

SEQ ID NO: 14701 - DNA, 23 bp, Homo sapiens
acattcctcggtatttattgtct

SEQ ID NO: 14702 - DNA, 23 bp, Homo sapiens
cattcctcggtatttattgtctg

SEQ ID NO: 14703 - DNA, 23 bp, Homo sapiens
attcctcggtatttattgtctgt

SEQ ID NO: 14704 - DNA, 23 bp, Homo sapiens
ttcctcggtatttattgtctgtc

SEQ ID NO: 14705 - DNA, 23 bp, Homo sapiens
tcctcggtatttattgtctgtcc

SEQ ID NO: 14706 - DNA, 23 bp, Homo sapiens
cctcggtatttattgtctgtccc

SEQ ID NO: 14707 - DNA, 23 bp, Homo sapiens
ctcggtatttattgtctgtcccc

SEQ ID NO: 14708 - DNA, 23 bp, Homo sapiens
tcggtatttattgtctgtcccca

SEQ ID NO: 14709 - DNA, 23 bp, Homo sapiens
cggtatttattgtctgtccccac

SEQ ID NO: 14710 - DNA, 23 bp, Homo sapiens
ggtatttattgtctgtccccacc

SEQ ID NO: 14711 - DNA, 23 bp, Homo sapiens
gtatttattgtctgtccccacct

SEQ ID NO: 14712 - DNA, 23 bp, Homo sapiens
tatttattgtctgtccccaccta

SEQ ID NO: 14713 - DNA, 23 bp, Homo sapiens
atttattgtctgtccccacctag

SEQ ID NO: 14714 - DNA, 23 bp, Homo sapiens
tttattgtctgtccccacctagg

SEQ ID NO: 14715 - DNA, 23 bp, Homo sapiens
ttattgtctgtccccacctagga

SEQ ID NO: 14716 - DNA, 23 bp, Homo sapiens
tattgtctgtccccacctaggac

SEQ ID NO: 14717 - DNA, 23 bp, Homo sapiens
attgtctgtccccacctaggacc

SEQ ID NO: 14718 - DNA, 23 bp, Homo sapiens
ttgtctgtccccacctaggaccc

SEQ ID NO: 14719 - DNA, 23 bp, Homo sapiens
tgtctgtccccacctaggacccc

SEQ ID NO: 14720 - DNA, 23 bp, Homo sapiens
gtctgtccccacctaggaccccc

SEQ ID NO: 14721 - DNA, 23 bp, Homo sapiens
tctgtccccacctaggaccccca

SEQ ID NO: 14722 - DNA, 23 bp, Homo sapiens
ctgtccccacctaggacccccac

SEQ ID NO: 14723 - DNA, 23 bp, Homo sapiens
tgtccccacctaggacccccacc

SEQ ID NO: 14724 - DNA, 23 bp, Homo sapiens
gtccccacctaggacccccaccc

SEQ ID NO: 14725 - DNA, 23 bp, Homo sapiens
tccccacctaggacccccacccc

SEQ ID NO: 14726 - DNA, 23 bp, Homo sapiens
ccccacctaggacccccaccccc

SEQ ID NO: 14727 - DNA, 23 bp, Homo sapiens
cccacctaggacccccacccccg

SEQ ID NO: 14728 - DNA, 23 bp, Homo sapiens
ccacctaggacccccacccccga

SEQ ID NO: 14729 - DNA, 23 bp, Homo sapiens
cacctaggacccccacccccgac

SEQ ID NO: 14730 - DNA, 23 bp, Homo sapiens
acctaggacccccacccccgacc

SEQ ID NO: 14731 - DNA, 23 bp, Homo sapiens
cctaggacccccacccccgaccc

SEQ ID NO: 14732 - DNA, 23 bp, Homo sapiens
ctaggacccccacccccgaccct

SEQ ID NO: 14733 - DNA, 23 bp, Homo sapiens
taggacccccacccccgaccctc

SEQ ID NO: 14734 - DNA, 23 bp, Homo sapiens
aggacccccacccccgaccctcg

SEQ ID NO: 14735 - DNA, 23 bp, Homo sapiens
ggacccccacccccgaccctcgc

SEQ ID NO: 14736 - DNA, 23 bp, Homo sapiens
gacccccacccccgaccctcgcg

SEQ ID NO: 14737 - DNA, 23 bp, Homo sapiens
acccccacccccgaccctcgcga

SEQ ID NO: 14738 - DNA, 23 bp, Homo sapiens
cccccacccccgaccctcgcgaa

SEQ ID NO: 14739 - DNA, 23 bp, Homo sapiens
ccccacccccgaccctcgcgaat

SEQ ID NO: 14740 - DNA, 23 bp, Homo sapiens
cccacccccgaccctcgcgaata

SEQ ID NO: 14741 - DNA, 23 bp, Homo sapiens
ccacccccgaccctcgcgaataa

SEQ ID NO: 14742 - DNA, 23 bp, Homo sapiens
cacccccgaccctcgcgaataaa

SEQ ID NO: 14743 - DNA, 23 bp, Homo sapiens
acccccgaccctcgcgaataaaa

SEQ ID NO: 14744 - DNA, 23 bp, Homo sapiens
cccccgaccctcgcgaataaaag

SEQ ID NO: 14745 - DNA, 23 bp, Homo sapiens
ccccgaccctcgcgaataaaagg

SEQ ID NO: 14746 - DNA, 23 bp, Homo sapiens
cccgaccctcgcgaataaaaggc

SEQ ID NO: 14747 - DNA, 23 bp, Homo sapiens
ccgaccctcgcgaataaaaggcc

SEQ ID NO: 14748 - DNA, 23 bp, Homo sapiens
cgaccctcgcgaataaaaggccc

SEQ ID NO: 14749 - DNA, 23 bp, Homo sapiens
gaccctcgcgaataaaaggccct

SEQ ID NO: 14750 - DNA, 23 bp, Homo sapiens
accctcgcgaataaaaggccctc

SEQ ID NO: 14751 - DNA, 23 bp, Homo sapiens
ccctcgcgaataaaaggccctcc

SEQ ID NO: 14752 - DNA, 23 bp, Homo sapiens
cctcgcgaataaaaggccctcca

SEQ ID NO: 14753 - DNA, 23 bp, Homo sapiens
ctcgcgaataaaaggccctccat

SEQ ID NO: 14754 - DNA, 23 bp, Homo sapiens
tcgcgaataaaaggccctccatc

SEQ ID NO: 14755 - DNA, 23 bp, Homo sapiens
cgcgaataaaaggccctccatct

SEQ ID NO: 14756 - DNA, 23 bp, Homo sapiens
gcgaataaaaggccctccatctg

SEQ ID NO: 14757 - DNA, 23 bp, Homo sapiens
cgaataaaaggccctccatctgc

SEQ ID NO: 14758 - DNA, 23 bp, Homo sapiens
gaataaaaggccctccatctgcc

SEQ ID NO: 14759 - DNA, 23 bp, Homo sapiens
aataaaaggccctccatctgccc

SEQ ID NO: 14760 - DNA, 23 bp, Homo sapiens
ataaaaggccctccatctgccca

SEQ ID NO: 14761 - DNA, 23 bp, Homo sapiens
taaaaggccctccatctgcccaa

SEQ ID NO: 14762 - DNA, 23 bp, Homo sapiens
aaaaggccctccatctgcccaaa

SEQ ID NO: 14763 - DNA, 23 bp, Homo sapiens
aaaggccctccatctgcccaaag

SEQ ID NO: 14764 - DNA, 23 bp, Homo sapiens
aaggccctccatctgcccaaagc

SEQ ID NO: 14765 - DNA, 23 bp, Homo sapiens
aggccctccatctgcccaaagct

SEQ ID NO: 14766 - DNA, 23 bp, Homo sapiens
ggccctccatctgcccaaagctc

SEQ ID NO: 14767 - DNA, 23 bp, Homo sapiens
gccctccatctgcccaaagctct

SEQ ID NO: 14768 - DNA, 23 bp, Homo sapiens
ccctccatctgcccaaagctctg

SEQ ID NO: 14769 - DNA, 23 bp, Homo sapiens
cctccatctgcccaaagctctgg

SEQ ID NO: 14770 - DNA, 23 bp, Homo sapiens
ctccatctgcccaaagctctgga

SEQ ID NO: 14771 - DNA, 19 bp, Homo sapiens
cagagaggcccaggggaca

SEQ ID NO: 14772 - DNA, 19 bp, Homo sapiens
agagaggcccaggggacag

SEQ ID NO: 14773 - DNA, 19 bp, Homo sapiens
gagaggcccaggggacagc

SEQ ID NO: 14774 - DNA, 19 bp, Homo sapiens
agaggcccaggggacagcc

SEQ ID NO: 14775 - DNA, 19 bp, Homo sapiens
gaggcccaggggacagcca

SEQ ID NO: 14776 - DNA, 19 bp, Homo sapiens
aggcccaggggacagccag

SEQ ID NO: 14777 - DNA, 19 bp, Homo sapiens
ggcccaggggacagccagg

SEQ ID NO: 14778 - DNA, 19 bp, Homo sapiens
gcccaggggacagccaggg

SEQ ID NO: 14779 - DNA, 19 bp, Homo sapiens
cccaggggacagccaggga

SEQ ID NO: 14780 - DNA, 19 bp, Homo sapiens
ccaggggacagccagggac

SEQ ID NO: 14781 - DNA, 19 bp, Homo sapiens
caggggacagccagggaca

SEQ ID NO: 14782 - DNA, 19 bp, Homo sapiens
aggggacagccagggacag

SEQ ID NO: 14783 - DNA, 19 bp, Homo sapiens
ggggacagccagggacagg

SEQ ID NO: 14784 - DNA, 19 bp, Homo sapiens
gggacagccagggacaggc

SEQ ID NO: 14785 - DNA, 19 bp, Homo sapiens
ggacagccagggacaggca

SEQ ID NO: 14786 - DNA, 19 bp, Homo sapiens
gacagccagggacaggcag

SEQ ID NO: 14787 - DNA, 19 bp, Homo sapiens
acagccagggacaggcaga

SEQ ID NO: 14788 - DNA, 19 bp, Homo sapiens
cagccagggacaggcagac

SEQ ID NO: 14789 - DNA, 19 bp, Homo sapiens
agccagggacaggcagaca

SEQ ID NO: 14790 - DNA, 19 bp, Homo sapiens
gccagggacaggcagacat

SEQ ID NO: 14791 - DNA, 19 bp, Homo sapiens
ccagggacaggcagacatg

SEQ ID NO: 14792 - DNA, 19 bp, Homo sapiens
cagggacaggcagacatgc

SEQ ID NO: 14793 - DNA, 19 bp, Homo sapiens
agggacaggcagacatgca

SEQ ID NO: 14794 - DNA, 19 bp, Homo sapiens
gggacaggcagacatgcag

SEQ ID NO: 14795 - DNA, 19 bp, Homo sapiens
ggacaggcagacatgcagc

SEQ ID NO: 14796 - DNA, 19 bp, Homo sapiens
gacaggcagacatgcagcc

SEQ ID NO: 14797 - DNA, 19 bp, Homo sapiens
acaggcagacatgcagcca

SEQ ID NO: 14798 - DNA, 19 bp, Homo sapiens
caggcagacatgcagccag

SEQ ID NO: 14799 - DNA, 19 bp, Homo sapiens
aggcagacatgcagccagg

SEQ ID NO: 14800 - DNA, 19 bp, Homo sapiens
ggcagacatgcagccaggg

SEQ ID NO: 14801 - DNA, 19 bp, Homo sapiens
gcagacatgcagccagggc

SEQ ID NO: 14802 - DNA, 19 bp, Homo sapiens
cagacatgcagccagggct

SEQ ID NO: 14803 - DNA, 19 bp, Homo sapiens
agacatgcagccagggctc

SEQ ID NO: 14804 - DNA, 19 bp, Homo sapiens
gacatgcagccagggctcc

SEQ ID NO: 14805 - DNA, 19 bp, Homo sapiens
acatgcagccagggctcca

SEQ ID NO: 14806 - DNA, 19 bp, Homo sapiens
catgcagccagggctccag

SEQ ID NO: 14807 - DNA, 19 bp, Homo sapiens
atgcagccagggctccagg

SEQ ID NO: 14808 - DNA, 19 bp, Homo sapiens
tgcagccagggctccaggg

SEQ ID NO: 14809 - DNA, 19 bp, Homo sapiens
gcagccagggctccagggc

SEQ ID NO: 14810 - DNA, 19 bp, Homo sapiens
cagccagggctccagggcc

SEQ ID NO: 14811 - DNA, 19 bp, Homo sapiens
agccagggctccagggcct

SEQ ID NO: 14812 - DNA, 19 bp, Homo sapiens
gccagggctccagggcctg

SEQ ID NO: 14813 - DNA, 19 bp, Homo sapiens
ccagggctccagggcctgg

SEQ ID NO: 14814 - DNA, 19 bp, Homo sapiens
cagggctccagggcctgga

SEQ ID NO: 14815 - DNA, 19 bp, Homo sapiens
agggctccagggcctggac

SEQ ID NO: 14816 - DNA, 19 bp, Homo sapiens
gggctccagggcctggaca

SEQ ID NO: 14817 - DNA, 19 bp, Homo sapiens
ggctccagggcctggacag

SEQ ID NO: 14818 - DNA, 19 bp, Homo sapiens
gctccagggcctggacagg

SEQ ID NO: 14819 - DNA, 19 bp, Homo sapiens
ctccagggcctggacaggg

SEQ ID NO: 14820 - DNA, 19 bp, Homo sapiens
tccagggcctggacagggg

SEQ ID NO: 14821 - DNA, 19 bp, Homo sapiens
ccagggcctggacaggggc

SEQ ID NO: 14822 - DNA, 19 bp, Homo sapiens
cagggcctggacaggggct

SEQ ID NO: 14823 - DNA, 19 bp, Homo sapiens
agggcctggacaggggctg

SEQ ID NO: 14824 - DNA, 19 bp, Homo sapiens
gggcctggacaggggctgc

SEQ ID NO: 14825 - DNA, 19 bp, Homo sapiens
ggcctggacaggggctgcc

SEQ ID NO: 14826 - DNA, 19 bp, Homo sapiens
gcctggacaggggctgcca

SEQ ID NO: 14827 - DNA, 19 bp, Homo sapiens
cctggacaggggctgccag

SEQ ID NO: 14828 - DNA, 19 bp, Homo sapiens
ctggacaggggctgccagg

SEQ ID NO: 14829 - DNA, 19 bp, Homo sapiens
tggacaggggctgccaggc

SEQ ID NO: 14830 - DNA, 19 bp, Homo sapiens
ggacaggggctgccaggcc

SEQ ID NO: 14831 - DNA, 19 bp, Homo sapiens
gacaggggctgccaggccc

SEQ ID NO: 14832 - DNA, 19 bp, Homo sapiens
acaggggctgccaggccct

SEQ ID NO: 14833 - DNA, 19 bp, Homo sapiens
caggggctgccaggccctg

SEQ ID NO: 14834 - DNA, 19 bp, Homo sapiens
aggggctgccaggccctgt

SEQ ID NO: 14835 - DNA, 19 bp, Homo sapiens
ggggctgccaggccctgtg

SEQ ID NO: 14836 - DNA, 19 bp, Homo sapiens
gggctgccaggccctgtga

SEQ ID NO: 14837 - DNA, 19 bp, Homo sapiens
ggctgccaggccctgtgac

SEQ ID NO: 14838 - DNA, 19 bp, Homo sapiens
gctgccaggccctgtgaca

SEQ ID NO: 14839 - DNA, 19 bp, Homo sapiens
ctgccaggccctgtgacag

SEQ ID NO: 14840 - DNA, 19 bp, Homo sapiens
tgccaggccctgtgacagg

SEQ ID NO: 14841 - DNA, 19 bp, Homo sapiens
gccaggccctgtgacagga

SEQ ID NO: 14842 - DNA, 19 bp, Homo sapiens
ccaggccctgtgacaggag

SEQ ID NO: 14843 - DNA, 19 bp, Homo sapiens
caggccctgtgacaggagg

SEQ ID NO: 14844 - DNA, 19 bp, Homo sapiens
aggccctgtgacaggagga

SEQ ID NO: 14845 - DNA, 19 bp, Homo sapiens
ggccctgtgacaggaggac

SEQ ID NO: 14846 - DNA, 19 bp, Homo sapiens
gccctgtgacaggaggacc

SEQ ID NO: 14847 - DNA, 19 bp, Homo sapiens
ccctgtgacaggaggaccc

SEQ ID NO: 14848 - DNA, 19 bp, Homo sapiens
cctgtgacaggaggacccc

SEQ ID NO: 14849 - DNA, 19 bp, Homo sapiens
ctgtgacaggaggaccccg

SEQ ID NO: 14850 - DNA, 19 bp, Homo sapiens
tgtgacaggaggaccccga

SEQ ID NO: 14851 - DNA, 19 bp, Homo sapiens
gtgacaggaggaccccgag

SEQ ID NO: 14852 - DNA, 19 bp, Homo sapiens
tgacaggaggaccccgagc

SEQ ID NO: 14853 - DNA, 19 bp, Homo sapiens
gacaggaggaccccgagcc

SEQ ID NO: 14854 - DNA, 19 bp, Homo sapiens
acaggaggaccccgagccc

SEQ ID NO: 14855 - DNA, 19 bp, Homo sapiens
caggaggaccccgagcccc

SEQ ID NO: 14856 - DNA, 19 bp, Homo sapiens
aggaggaccccgagccccc

SEQ ID NO: 14857 - DNA, 19 bp, Homo sapiens
ggaggaccccgagcccccg

SEQ ID NO: 14858 - DNA, 19 bp, Homo sapiens
gaggaccccgagcccccgg

SEQ ID NO: 14859 - DNA, 19 bp, Homo sapiens
aggaccccgagcccccggc

SEQ ID NO: 14860 - DNA, 19 bp, Homo sapiens
ggaccccgagcccccggcc

SEQ ID NO: 14861 - DNA, 19 bp, Homo sapiens
gaccccgagcccccggccc

SEQ ID NO: 14862 - DNA, 19 bp, Homo sapiens
accccgagcccccggcccg

SEQ ID NO: 14863 - DNA, 19 bp, Homo sapiens
ccccgagcccccggcccgg

SEQ ID NO: 14864 - DNA, 19 bp, Homo sapiens
cccgagcccccggcccggg

SEQ ID NO: 14865 - DNA, 19 bp, Homo sapiens
ccgagcccccggcccgggg

SEQ ID NO: 14866 - DNA, 19 bp, Homo sapiens
cgagcccccggcccgggga

SEQ ID NO: 14867 - DNA, 19 bp, Homo sapiens
gagcccccggcccggggag

SEQ ID NO: 14868 - DNA, 19 bp, Homo sapiens
agcccccggcccggggagg

SEQ ID NO: 14869 - DNA, 19 bp, Homo sapiens
gcccccggcccggggaggg

SEQ ID NO: 14870 - DNA, 19 bp, Homo sapiens
cccccggcccggggagggg

SEQ ID NO: 14871 - DNA, 19 bp, Homo sapiens
ccccggcccggggaggggc

SEQ ID NO: 14872 - DNA, 19 bp, Homo sapiens
cccggcccggggaggggcc

SEQ ID NO: 14873 - DNA, 19 bp, Homo sapiens
ccggcccggggaggggcca

SEQ ID NO: 14874 - DNA, 19 bp, Homo sapiens
cggcccggggaggggccat

SEQ ID NO: 14875 - DNA, 19 bp, Homo sapiens
ggcccggggaggggccatg

SEQ ID NO: 14876 - DNA, 19 bp, Homo sapiens
gcccggggaggggccatgg

SEQ ID NO: 14877 - DNA, 19 bp, Homo sapiens
cccggggaggggccatggt

SEQ ID NO: 14878 - DNA, 19 bp, Homo sapiens
ccggggaggggccatggtg

SEQ ID NO: 14879 - DNA, 19 bp, Homo sapiens
cggggaggggccatggtgc

SEQ ID NO: 14880 - DNA, 19 bp, Homo sapiens
ggggaggggccatggtgct

SEQ ID NO: 14881 - DNA, 19 bp, Homo sapiens
gggaggggccatggtgctg

SEQ ID NO: 14882 - DNA, 19 bp, Homo sapiens
ggaggggccatggtgctgc

SEQ ID NO: 14883 - DNA, 19 bp, Homo sapiens
gaggggccatggtgctgcc

SEQ ID NO: 14884 - DNA, 19 bp, Homo sapiens
aggggccatggtgctgcct

SEQ ID NO: 14885 - DNA, 19 bp, Homo sapiens
ggggccatggtgctgcctg

SEQ ID NO: 14886 - DNA, 19 bp, Homo sapiens
gggccatggtgctgcctgt

SEQ ID NO: 14887 - DNA, 19 bp, Homo sapiens
ggccatggtgctgcctgtc

SEQ ID NO: 14888 - DNA, 19 bp, Homo sapiens
gccatggtgctgcctgtcc

SEQ ID NO: 14889 - DNA, 19 bp, Homo sapiens
ccatggtgctgcctgtcca

SEQ ID NO: 14890 - DNA, 19 bp, Homo sapiens
catggtgctgcctgtccaa

SEQ ID NO: 14891 - DNA, 19 bp, Homo sapiens
atggtgctgcctgtccaac

SEQ ID NO: 14892 - DNA, 19 bp, Homo sapiens
tggtgctgcctgtccaaca

SEQ ID NO: 14893 - DNA, 19 bp, Homo sapiens
ggtgctgcctgtccaacat

SEQ ID NO: 14894 - DNA, 19 bp, Homo sapiens
gtgctgcctgtccaacatg

SEQ ID NO: 14895 - DNA, 19 bp, Homo sapiens
tgctgcctgtccaacatgt

SEQ ID NO: 14896 - DNA, 19 bp, Homo sapiens
gctgcctgtccaacatgtc

SEQ ID NO: 14897 - DNA, 19 bp, Homo sapiens
ctgcctgtccaacatgtca

SEQ ID NO: 14898 - DNA, 19 bp, Homo sapiens
tgcctgtccaacatgtcag

SEQ ID NO: 14899 - DNA, 19 bp, Homo sapiens
gcctgtccaacatgtcagc

SEQ ID NO: 14900 - DNA, 19 bp, Homo sapiens
cctgtccaacatgtcagcc

SEQ ID NO: 14901 - DNA, 19 bp, Homo sapiens
ctgtccaacatgtcagccg

SEQ ID NO: 14902 - DNA, 19 bp, Homo sapiens
tgtccaacatgtcagccga

SEQ ID NO: 14903 - DNA, 19 bp, Homo sapiens
gtccaacatgtcagccgag

SEQ ID NO: 14904 - DNA, 19 bp, Homo sapiens
tccaacatgtcagccgagg

SEQ ID NO: 14905 - DNA, 19 bp, Homo sapiens
ccaacatgtcagccgaggt

SEQ ID NO: 14906 - DNA, 19 bp, Homo sapiens
caacatgtcagccgaggtg

SEQ ID NO: 14907 - DNA, 19 bp, Homo sapiens
aacatgtcagccgaggtgc

SEQ ID NO: 14908 - DNA, 19 bp, Homo sapiens
acatgtcagccgaggtgcg

SEQ ID NO: 14909 - DNA, 19 bp, Homo sapiens
catgtcagccgaggtgcgg

SEQ ID NO: 14910 - DNA, 19 bp, Homo sapiens
atgtcagccgaggtgcggc

SEQ ID NO: 14911 - DNA, 19 bp, Homo sapiens
tgtcagccgaggtgcggct

SEQ ID NO: 14912 - DNA, 19 bp, Homo sapiens
gtcagccgaggtgcggctg

SEQ ID NO: 14913 - DNA, 19 bp, Homo sapiens
tcagccgaggtgcggctga

SEQ ID NO: 14914 - DNA, 19 bp, Homo sapiens
cagccgaggtgcggctgag

SEQ ID NO: 14915 - DNA, 19 bp, Homo sapiens
agccgaggtgcggctgagg

SEQ ID NO: 14916 - DNA, 19 bp, Homo sapiens
gccgaggtgcggctgaggc

SEQ ID NO: 14917 - DNA, 19 bp, Homo sapiens
ccgaggtgcggctgaggcg

SEQ ID NO: 14918 - DNA, 19 bp, Homo sapiens
cgaggtgcggctgaggcgg

SEQ ID NO: 14919 - DNA, 19 bp, Homo sapiens
gaggtgcggctgaggcggc

SEQ ID NO: 14920 - DNA, 19 bp, Homo sapiens
aggtgcggctgaggcggct

SEQ ID NO: 14921 - DNA, 19 bp, Homo sapiens
ggtgcggctgaggcggctc

SEQ ID NO: 14922 - DNA, 19 bp, Homo sapiens
gtgcggctgaggcggctcc

SEQ ID NO: 14923 - DNA, 19 bp, Homo sapiens
tgcggctgaggcggctcca

SEQ ID NO: 14924 - DNA, 19 bp, Homo sapiens
gcggctgaggcggctccag

SEQ ID NO: 14925 - DNA, 19 bp, Homo sapiens
cggctgaggcggctccagc

SEQ ID NO: 14926 - DNA, 19 bp, Homo sapiens
ggctgaggcggctccagca

SEQ ID NO: 14927 - DNA, 19 bp, Homo sapiens
gctgaggcggctccagcag

SEQ ID NO: 14928 - DNA, 19 bp, Homo sapiens
ctgaggcggctccagcagc

SEQ ID NO: 14929 - DNA, 19 bp, Homo sapiens
tgaggcggctccagcagct

SEQ ID NO: 14930 - DNA, 19 bp, Homo sapiens
gaggcggctccagcagctg

SEQ ID NO: 14931 - DNA, 19 bp, Homo sapiens
aggcggctccagcagctgg

SEQ ID NO: 14932 - DNA, 19 bp, Homo sapiens
ggcggctccagcagctggt

SEQ ID NO: 14933 - DNA, 19 bp, Homo sapiens
gcggctccagcagctggtg

SEQ ID NO: 14934 - DNA, 19 bp, Homo sapiens
cggctccagcagctggtgt

SEQ ID NO: 14935 - DNA, 19 bp, Homo sapiens
ggctccagcagctggtgtt

SEQ ID NO: 14936 - DNA, 19 bp, Homo sapiens
gctccagcagctggtgttg

SEQ ID NO: 14937 - DNA, 19 bp, Homo sapiens
ctccagcagctggtgttgg

SEQ ID NO: 14938 - DNA, 19 bp, Homo sapiens
tccagcagctggtgttgga

SEQ ID NO: 14939 - DNA, 19 bp, Homo sapiens
ccagcagctggtgttggac

SEQ ID NO: 14940 - DNA, 19 bp, Homo sapiens
cagcagctggtgttggacc

SEQ ID NO: 14941 - DNA, 19 bp, Homo sapiens
agcagctggtgttggaccc

SEQ ID NO: 14942 - DNA, 19 bp, Homo sapiens
gcagctggtgttggacccg

SEQ ID NO: 14943 - DNA, 19 bp, Homo sapiens
cagctggtgttggacccgg

SEQ ID NO: 14944 - DNA, 19 bp, Homo sapiens
agctggtgttggacccggg

SEQ ID NO: 14945 - DNA, 19 bp, Homo sapiens
gctggtgttggacccgggc

SEQ ID NO: 14946 - DNA, 19 bp, Homo sapiens
ctggtgttggacccgggct

SEQ ID NO: 14947 - DNA, 19 bp, Homo sapiens
tggtgttggacccgggctt

SEQ ID NO: 14948 - DNA, 19 bp, Homo sapiens
ggtgttggacccgggcttc

SEQ ID NO: 14949 - DNA, 19 bp, Homo sapiens
gtgttggacccgggcttcc

SEQ ID NO: 14950 - DNA, 19 bp, Homo sapiens
tgttggacccgggcttcct

SEQ ID NO: 14951 - DNA, 19 bp, Homo sapiens
gttggacccgggcttcctg

SEQ ID NO: 14952 - DNA, 19 bp, Homo sapiens
ttggacccgggcttcctgg

SEQ ID NO: 14953 - DNA, 19 bp, Homo sapiens
tggacccgggcttcctggg

SEQ ID NO: 14954 - DNA, 19 bp, Homo sapiens
ggacccgggcttcctgggg

SEQ ID NO: 14955 - DNA, 19 bp, Homo sapiens
gacccgggcttcctggggc

SEQ ID NO: 14956 - DNA, 19 bp, Homo sapiens
acccgggcttcctggggct

SEQ ID NO: 14957 - DNA, 19 bp, Homo sapiens
cccgggcttcctggggctg

SEQ ID NO: 14958 - DNA, 19 bp, Homo sapiens
ccgggcttcctggggctgg

SEQ ID NO: 14959 - DNA, 19 bp, Homo sapiens
cgggcttcctggggctgga

SEQ ID NO: 14960 - DNA, 19 bp, Homo sapiens
gggcttcctggggctggag

SEQ ID NO: 14961 - DNA, 19 bp, Homo sapiens
ggcttcctggggctggagc

SEQ ID NO: 14962 - DNA, 19 bp, Homo sapiens
gcttcctggggctggagcc

SEQ ID NO: 14963 - DNA, 19 bp, Homo sapiens
cttcctggggctggagccc

SEQ ID NO: 14964 - DNA, 19 bp, Homo sapiens
ttcctggggctggagcccc

SEQ ID NO: 14965 - DNA, 19 bp, Homo sapiens
tcctggggctggagcccct

SEQ ID NO: 14966 - DNA, 19 bp, Homo sapiens
cctggggctggagcccctg

SEQ ID NO: 14967 - DNA, 19 bp, Homo sapiens
ctggggctggagcccctgc

SEQ ID NO: 14968 - DNA, 19 bp, Homo sapiens
tggggctggagcccctgct

SEQ ID NO: 14969 - DNA, 19 bp, Homo sapiens
ggggctggagcccctgctc

SEQ ID NO: 14970 - DNA, 19 bp, Homo sapiens
gggctggagcccctgctcg

SEQ ID NO: 14971 - DNA, 19 bp, Homo sapiens
ggctggagcccctgctcga

SEQ ID NO: 14972 - DNA, 19 bp, Homo sapiens
gctggagcccctgctcgac

SEQ ID NO: 14973 - DNA, 19 bp, Homo sapiens
ctggagcccctgctcgacc

SEQ ID NO: 14974 - DNA, 19 bp, Homo sapiens
tggagcccctgctcgacct

SEQ ID NO: 14975 - DNA, 19 bp, Homo sapiens
ggagcccctgctcgacctt

SEQ ID NO: 14976 - DNA, 19 bp, Homo sapiens
gagcccctgctcgaccttc

SEQ ID NO: 14977 - DNA, 19 bp, Homo sapiens
agcccctgctcgaccttct

SEQ ID NO: 14978 - DNA, 19 bp, Homo sapiens
gcccctgctcgaccttctc

SEQ ID NO: 14979 - DNA, 19 bp, Homo sapiens
cccctgctcgaccttctcc

SEQ ID NO: 14980 - DNA, 19 bp, Homo sapiens
ccctgctcgaccttctcct

SEQ ID NO: 14981 - DNA, 19 bp, Homo sapiens
cctgctcgaccttctcctg

SEQ ID NO: 14982 - DNA, 19 bp, Homo sapiens
ctgctcgaccttctcctgg

SEQ ID NO: 14983 - DNA, 19 bp, Homo sapiens
tgctcgaccttctcctggg

SEQ ID NO: 14984 - DNA, 19 bp, Homo sapiens
gctcgaccttctcctgggc

SEQ ID NO: 14985 - DNA, 19 bp, Homo sapiens
ctcgaccttctcctgggcg

SEQ ID NO: 14986 - DNA, 19 bp, Homo sapiens
tcgaccttctcctgggcgt

SEQ ID NO: 14987 - DNA, 19 bp, Homo sapiens
cgaccttctcctgggcgtc

SEQ ID NO: 14988 - DNA, 19 bp, Homo sapiens
gaccttctcctgggcgtcc

SEQ ID NO: 14989 - DNA, 19 bp, Homo sapiens
accttctcctgggcgtcca

SEQ ID NO: 14990 - DNA, 19 bp, Homo sapiens
ccttctcctgggcgtccac

SEQ ID NO: 14991 - DNA, 19 bp, Homo sapiens
cttctcctgggcgtccacc

SEQ ID NO: 14992 - DNA, 19 bp, Homo sapiens
ttctcctgggcgtccacca

SEQ ID NO: 14993 - DNA, 19 bp, Homo sapiens
tctcctgggcgtccaccag

SEQ ID NO: 14994 - DNA, 19 bp, Homo sapiens
ctcctgggcgtccaccagg

SEQ ID NO: 14995 - DNA, 19 bp, Homo sapiens
tcctgggcgtccaccagga

SEQ ID NO: 14996 - DNA, 19 bp, Homo sapiens
cctgggcgtccaccaggag

SEQ ID NO: 14997 - DNA, 19 bp, Homo sapiens
ctgggcgtccaccaggagc

SEQ ID NO: 14998 - DNA, 19 bp, Homo sapiens
tgggcgtccaccaggagct

SEQ ID NO: 14999 - DNA, 19 bp, Homo sapiens
gggcgtccaccaggagctg

SEQ ID NO: 15000 - DNA, 19 bp, Homo sapiens
ggcgtccaccaggagctgg

SEQ ID NO: 15001 - DNA, 19 bp, Homo sapiens
gcgtccaccaggagctggg

SEQ ID NO: 15002 - DNA, 19 bp, Homo sapiens
cgtccaccaggagctgggc

SEQ ID NO: 15003 - DNA, 19 bp, Homo sapiens
gtccaccaggagctgggcg

SEQ ID NO: 15004 - DNA, 19 bp, Homo sapiens
tccaccaggagctgggcgc

SEQ ID NO: 15005 - DNA, 19 bp, Homo sapiens
ccaccaggagctgggcgcc

SEQ ID NO: 15006 - DNA, 19 bp, Homo sapiens
caccaggagctgggcgcct

SEQ ID NO: 15007 - DNA, 19 bp, Homo sapiens
accaggagctgggcgcctc

SEQ ID NO: 15008 - DNA, 19 bp, Homo sapiens
ccaggagctgggcgcctcc

SEQ ID NO: 15009 - DNA, 19 bp, Homo sapiens
caggagctgggcgcctccg

SEQ ID NO: 15010 - DNA, 19 bp, Homo sapiens
aggagctgggcgcctccga

SEQ ID NO: 15011 - DNA, 19 bp, Homo sapiens
ggagctgggcgcctccgaa

SEQ ID NO: 15012 - DNA, 19 bp, Homo sapiens
gagctgggcgcctccgaac

SEQ ID NO: 15013 - DNA, 19 bp, Homo sapiens
agctgggcgcctccgaact

SEQ ID NO: 15014 - DNA, 19 bp, Homo sapiens
gctgggcgcctccgaactg

SEQ ID NO: 15015 - DNA, 19 bp, Homo sapiens
ctgggcgcctccgaactgg

SEQ ID NO: 15016 - DNA, 19 bp, Homo sapiens
tgggcgcctccgaactggc

SEQ ID NO: 15017 - DNA, 19 bp, Homo sapiens
gggcgcctccgaactggcc

SEQ ID NO: 15018 - DNA, 19 bp, Homo sapiens
ggcgcctccgaactggccc

SEQ ID NO: 15019 - DNA, 19 bp, Homo sapiens
gcgcctccgaactggccca

SEQ ID NO: 15020 - DNA, 19 bp, Homo sapiens
cgcctccgaactggcccag

SEQ ID NO: 15021 - DNA, 19 bp, Homo sapiens
gcctccgaactggcccagg

SEQ ID NO: 15022 - DNA, 19 bp, Homo sapiens
cctccgaactggcccagga

SEQ ID NO: 15023 - DNA, 19 bp, Homo sapiens
ctccgaactggcccaggac

SEQ ID NO: 15024 - DNA, 19 bp, Homo sapiens
tccgaactggcccaggaca

SEQ ID NO: 15025 - DNA, 19 bp, Homo sapiens
ccgaactggcccaggacaa

SEQ ID NO: 15026 - DNA, 19 bp, Homo sapiens
cgaactggcccaggacaag

SEQ ID NO: 15027 - DNA, 19 bp, Homo sapiens
gaactggcccaggacaagt

SEQ ID NO: 15028 - DNA, 19 bp, Homo sapiens
aactggcccaggacaagta

SEQ ID NO: 15029 - DNA, 19 bp, Homo sapiens
actggcccaggacaagtac

SEQ ID NO: 15030 - DNA, 19 bp, Homo sapiens
ctggcccaggacaagtacg

SEQ ID NO: 15031 - DNA, 19 bp, Homo sapiens
tggcccaggacaagtacgt

SEQ ID NO: 15032 - DNA, 19 bp, Homo sapiens
ggcccaggacaagtacgtg

SEQ ID NO: 15033 - DNA, 19 bp, Homo sapiens
gcccaggacaagtacgtgg

SEQ ID NO: 15034 - DNA, 19 bp, Homo sapiens
cccaggacaagtacgtggc

SEQ ID NO: 15035 - DNA, 19 bp, Homo sapiens
ccaggacaagtacgtggcc

SEQ ID NO: 15036 - DNA, 19 bp, Homo sapiens
caggacaagtacgtggccg

SEQ ID NO: 15037 - DNA, 19 bp, Homo sapiens
aggacaagtacgtggccga

SEQ ID NO: 15038 - DNA, 19 bp, Homo sapiens
ggacaagtacgtggccgac

SEQ ID NO: 15039 - DNA, 19 bp, Homo sapiens
gacaagtacgtggccgact

SEQ ID NO: 15040 - DNA, 19 bp, Homo sapiens
acaagtacgtggccgactt

SEQ ID NO: 15041 - DNA, 19 bp, Homo sapiens
caagtacgtggccgacttc

SEQ ID NO: 15042 - DNA, 19 bp, Homo sapiens
aagtacgtggccgacttct

SEQ ID NO: 15043 - DNA, 19 bp, Homo sapiens
agtacgtggccgacttctt

SEQ ID NO: 15044 - DNA, 19 bp, Homo sapiens
gtacgtggccgacttcttg

SEQ ID NO: 15045 - DNA, 19 bp, Homo sapiens
tacgtggccgacttcttgc

SEQ ID NO: 15046 - DNA, 19 bp, Homo sapiens
acgtggccgacttcttgca

SEQ ID NO: 15047 - DNA, 19 bp, Homo sapiens
cgtggccgacttcttgcag

SEQ ID NO: 15048 - DNA, 19 bp, Homo sapiens
gtggccgacttcttgcagt

SEQ ID NO: 15049 - DNA, 19 bp, Homo sapiens
tggccgacttcttgcagtg

SEQ ID NO: 15050 - DNA, 19 bp, Homo sapiens
ggccgacttcttgcagtgg

SEQ ID NO: 15051 - DNA, 19 bp, Homo sapiens
gccgacttcttgcagtggg

SEQ ID NO: 15052 - DNA, 19 bp, Homo sapiens
ccgacttcttgcagtgggc

SEQ ID NO: 15053 - DNA, 19 bp, Homo sapiens
cgacttcttgcagtgggcg

SEQ ID NO: 15054 - DNA, 19 bp, Homo sapiens
gacttcttgcagtgggcgg

SEQ ID NO: 15055 - DNA, 19 bp, Homo sapiens
acttcttgcagtgggcgga

SEQ ID NO: 15056 - DNA, 19 bp, Homo sapiens
cttcttgcagtgggcggag

SEQ ID NO: 15057 - DNA, 19 bp, Homo sapiens
ttcttgcagtgggcggagc

SEQ ID NO: 15058 - DNA, 19 bp, Homo sapiens
tcttgcagtgggcggagcc

SEQ ID NO: 15059 - DNA, 19 bp, Homo sapiens
cttgcagtgggcggagccc

SEQ ID NO: 15060 - DNA, 19 bp, Homo sapiens
ttgcagtgggcggagccca

SEQ ID NO: 15061 - DNA, 19 bp, Homo sapiens
tgcagtgggcggagcccat

SEQ ID NO: 15062 - DNA, 19 bp, Homo sapiens
gcagtgggcggagcccatc

SEQ ID NO: 15063 - DNA, 19 bp, Homo sapiens
cagtgggcggagcccatcg

SEQ ID NO: 15064 - DNA, 19 bp, Homo sapiens
agtgggcggagcccatcgt

SEQ ID NO: 15065 - DNA, 19 bp, Homo sapiens
gtgggcggagcccatcgtg

SEQ ID NO: 15066 - DNA, 19 bp, Homo sapiens
tgggcggagcccatcgtgg

SEQ ID NO: 15067 - DNA, 19 bp, Homo sapiens
gggcggagcccatcgtggt

SEQ ID NO: 15068 - DNA, 19 bp, Homo sapiens
ggcggagcccatcgtggtg

SEQ ID NO: 15069 - DNA, 19 bp, Homo sapiens
gcggagcccatcgtggtga

SEQ ID NO: 15070 - DNA, 19 bp, Homo sapiens
cggagcccatcgtggtgag

SEQ ID NO: 15071 - DNA, 19 bp, Homo sapiens
ggagcccatcgtggtgagg

SEQ ID NO: 15072 - DNA, 19 bp, Homo sapiens
gagcccatcgtggtgaggc

SEQ ID NO: 15073 - DNA, 19 bp, Homo sapiens
agcccatcgtggtgaggct

SEQ ID NO: 15074 - DNA, 19 bp, Homo sapiens
gcccatcgtggtgaggctt

SEQ ID NO: 15075 - DNA, 19 bp, Homo sapiens
cccatcgtggtgaggctta

SEQ ID NO: 15076 - DNA, 19 bp, Homo sapiens
ccatcgtggtgaggcttaa

SEQ ID NO: 15077 - DNA, 19 bp, Homo sapiens
catcgtggtgaggcttaag

SEQ ID NO: 15078 - DNA, 19 bp, Homo sapiens
atcgtggtgaggcttaagg

SEQ ID NO: 15079 - DNA, 19 bp, Homo sapiens
tcgtggtgaggcttaagga

SEQ ID NO: 15080 - DNA, 19 bp, Homo sapiens
cgtggtgaggcttaaggag

SEQ ID NO: 15081 - DNA, 19 bp, Homo sapiens
gtggtgaggcttaaggagg

SEQ ID NO: 15082 - DNA, 19 bp, Homo sapiens
tggtgaggcttaaggaggt

SEQ ID NO: 15083 - DNA, 19 bp, Homo sapiens
ggtgaggcttaaggaggtc

SEQ ID NO: 15084 - DNA, 19 bp, Homo sapiens
gtgaggcttaaggaggtcc

SEQ ID NO: 15085 - DNA, 19 bp, Homo sapiens
tgaggcttaaggaggtccg

SEQ ID NO: 15086 - DNA, 19 bp, Homo sapiens
gaggcttaaggaggtccga

SEQ ID NO: 15087 - DNA, 19 bp, Homo sapiens
aggcttaaggaggtccgac

SEQ ID NO: 15088 - DNA, 19 bp, Homo sapiens
ggcttaaggaggtccgact

SEQ ID NO: 15089 - DNA, 19 bp, Homo sapiens
gcttaaggaggtccgactg

SEQ ID NO: 15090 - DNA, 19 bp, Homo sapiens
cttaaggaggtccgactgc

SEQ ID NO: 15091 - DNA, 19 bp, Homo sapiens
ttaaggaggtccgactgca

SEQ ID NO: 15092 - DNA, 19 bp, Homo sapiens
taaggaggtccgactgcag

SEQ ID NO: 15093 - DNA, 19 bp, Homo sapiens
aaggaggtccgactgcaga

SEQ ID NO: 15094 - DNA, 19 bp, Homo sapiens
aggaggtccgactgcagag

SEQ ID NO: 15095 - DNA, 19 bp, Homo sapiens
ggaggtccgactgcagagg

SEQ ID NO: 15096 - DNA, 19 bp, Homo sapiens
gaggtccgactgcagaggg

SEQ ID NO: 15097 - DNA, 19 bp, Homo sapiens
aggtccgactgcagaggga

SEQ ID NO: 15098 - DNA, 19 bp, Homo sapiens
ggtccgactgcagagggac

SEQ ID NO: 15099 - DNA, 19 bp, Homo sapiens
gtccgactgcagagggacg

SEQ ID NO: 15100 - DNA, 19 bp, Homo sapiens
tccgactgcagagggacga

SEQ ID NO: 15101 - DNA, 19 bp, Homo sapiens
ccgactgcagagggacgac

SEQ ID NO: 15102 - DNA, 19 bp, Homo sapiens
cgactgcagagggacgact

SEQ ID NO: 15103 - DNA, 19 bp, Homo sapiens
gactgcagagggacgactt

SEQ ID NO: 15104 - DNA, 19 bp, Homo sapiens
actgcagagggacgacttc

SEQ ID NO: 15105 - DNA, 19 bp, Homo sapiens
ctgcagagggacgacttcg

SEQ ID NO: 15106 - DNA, 19 bp, Homo sapiens
tgcagagggacgacttcga

SEQ ID NO: 15107 - DNA, 19 bp, Homo sapiens
gcagagggacgacttcgag

SEQ ID NO: 15108 - DNA, 19 bp, Homo sapiens
cagagggacgacttcgaga

SEQ ID NO: 15109 - DNA, 19 bp, Homo sapiens
agagggacgacttcgagat

SEQ ID NO: 15110 - DNA, 19 bp, Homo sapiens
gagggacgacttcgagatt

SEQ ID NO: 15111 - DNA, 19 bp, Homo sapiens
agggacgacttcgagattc

SEQ ID NO: 15112 - DNA, 19 bp, Homo sapiens
gggacgacttcgagattct

SEQ ID NO: 15113 - DNA, 19 bp, Homo sapiens
ggacgacttcgagattctg

SEQ ID NO: 15114 - DNA, 19 bp, Homo sapiens
gacgacttcgagattctga

SEQ ID NO: 15115 - DNA, 19 bp, Homo sapiens
acgacttcgagattctgaa

SEQ ID NO: 15116 - DNA, 19 bp, Homo sapiens
cgacttcgagattctgaag

SEQ ID NO: 15117 - DNA, 19 bp, Homo sapiens
gacttcgagattctgaagg

SEQ ID NO: 15118 - DNA, 19 bp, Homo sapiens
acttcgagattctgaaggt

SEQ ID NO: 15119 - DNA, 19 bp, Homo sapiens
cttcgagattctgaaggtg

SEQ ID NO: 15120 - DNA, 19 bp, Homo sapiens
ttcgagattctgaaggtga

SEQ ID NO: 15121 - DNA, 19 bp, Homo sapiens
tcgagattctgaaggtgat

SEQ ID NO: 15122 - DNA, 19 bp, Homo sapiens
cgagattctgaaggtgatc

SEQ ID NO: 15123 - DNA, 19 bp, Homo sapiens
gagattctgaaggtgatcg

SEQ ID NO: 15124 - DNA, 19 bp, Homo sapiens
agattctgaaggtgatcgg

SEQ ID NO: 15125 - DNA, 19 bp, Homo sapiens
gattctgaaggtgatcgga

SEQ ID NO: 15126 - DNA, 19 bp, Homo sapiens
attctgaaggtgatcggac

SEQ ID NO: 15127 - DNA, 19 bp, Homo sapiens
ttctgaaggtgatcggacg

SEQ ID NO: 15128 - DNA, 19 bp, Homo sapiens
tctgaaggtgatcggacgc

SEQ ID NO: 15129 - DNA, 19 bp, Homo sapiens
ctgaaggtgatcggacgcg

SEQ ID NO: 15130 - DNA, 19 bp, Homo sapiens
tgaaggtgatcggacgcgg

SEQ ID NO: 15131 - DNA, 19 bp, Homo sapiens
gaaggtgatcggacgcggg

SEQ ID NO: 15132 - DNA, 19 bp, Homo sapiens
aaggtgatcggacgcgggg

SEQ ID NO: 15133 - DNA, 19 bp, Homo sapiens
aggtgatcggacgcggggc

SEQ ID NO: 15134 - DNA, 19 bp, Homo sapiens
ggtgatcggacgcggggcg

SEQ ID NO: 15135 - DNA, 19 bp, Homo sapiens
gtgatcggacgcggggcgt

SEQ ID NO: 15136 - DNA, 19 bp, Homo sapiens
tgatcggacgcggggcgtt

SEQ ID NO: 15137 - DNA, 19 bp, Homo sapiens
gatcggacgcggggcgttc

SEQ ID NO: 15138 - DNA, 19 bp, Homo sapiens
atcggacgcggggcgttca

SEQ ID NO: 15139 - DNA, 19 bp, Homo sapiens
tcggacgcggggcgttcag

SEQ ID NO: 15140 - DNA, 19 bp, Homo sapiens
cggacgcggggcgttcagc

SEQ ID NO: 15141 - DNA, 19 bp, Homo sapiens
ggacgcggggcgttcagcg

SEQ ID NO: 15142 - DNA, 19 bp, Homo sapiens
gacgcggggcgttcagcga

SEQ ID NO: 15143 - DNA, 19 bp, Homo sapiens
acgcggggcgttcagcgag

SEQ ID NO: 15144 - DNA, 19 bp, Homo sapiens
cgcggggcgttcagcgagg

SEQ ID NO: 15145 - DNA, 19 bp, Homo sapiens
gcggggcgttcagcgaggt

SEQ ID NO: 15146 - DNA, 19 bp, Homo sapiens
cggggcgttcagcgaggta

SEQ ID NO: 15147 - DNA, 19 bp, Homo sapiens
ggggcgttcagcgaggtag

SEQ ID NO: 15148 - DNA, 19 bp, Homo sapiens
gggcgttcagcgaggtagc

SEQ ID NO: 15149 - DNA, 19 bp, Homo sapiens
ggcgttcagcgaggtagcg

SEQ ID NO: 15150 - DNA, 19 bp, Homo sapiens
gcgttcagcgaggtagcgg

SEQ ID NO: 15151 - DNA, 19 bp, Homo sapiens
cgttcagcgaggtagcggt

SEQ ID NO: 15152 - DNA, 19 bp, Homo sapiens
gttcagcgaggtagcggta

SEQ ID NO: 15153 - DNA, 19 bp, Homo sapiens
ttcagcgaggtagcggtag

SEQ ID NO: 15154 - DNA, 19 bp, Homo sapiens
tcagcgaggtagcggtagt

SEQ ID NO: 15155 - DNA, 19 bp, Homo sapiens
cagcgaggtagcggtagtg

SEQ ID NO: 15156 - DNA, 19 bp, Homo sapiens
agcgaggtagcggtagtga

SEQ ID NO: 15157 - DNA, 19 bp, Homo sapiens
gcgaggtagcggtagtgaa

SEQ ID NO: 15158 - DNA, 19 bp, Homo sapiens
cgaggtagcggtagtgaag

SEQ ID NO: 15159 - DNA, 19 bp, Homo sapiens
gaggtagcggtagtgaaga

SEQ ID NO: 15160 - DNA, 19 bp, Homo sapiens
aggtagcggtagtgaagat

SEQ ID NO: 15161 - DNA, 19 bp, Homo sapiens
ggtagcggtagtgaagatg

SEQ ID NO: 15162 - DNA, 19 bp, Homo sapiens
gtagcggtagtgaagatga

SEQ ID NO: 15163 - DNA, 19 bp, Homo sapiens
tagcggtagtgaagatgaa

SEQ ID NO: 15164 - DNA, 19 bp, Homo sapiens
agcggtagtgaagatgaag

SEQ ID NO: 15165 - DNA, 19 bp, Homo sapiens
gcggtagtgaagatgaagc

SEQ ID NO: 15166 - DNA, 19 bp, Homo sapiens
cggtagtgaagatgaagca

SEQ ID NO: 15167 - DNA, 19 bp, Homo sapiens
ggtagtgaagatgaagcag

SEQ ID NO: 15168 - DNA, 19 bp, Homo sapiens
gtagtgaagatgaagcaga

SEQ ID NO: 15169 - DNA, 19 bp, Homo sapiens
tagtgaagatgaagcagac

SEQ ID NO: 15170 - DNA, 19 bp, Homo sapiens
agtgaagatgaagcagacg

SEQ ID NO: 15171 - DNA, 19 bp, Homo sapiens
gtgaagatgaagcagacgg

SEQ ID NO: 15172 - DNA, 19 bp, Homo sapiens
tgaagatgaagcagacggg

SEQ ID NO: 15173 - DNA, 19 bp, Homo sapiens
gaagatgaagcagacgggc

SEQ ID NO: 15174 - DNA, 19 bp, Homo sapiens
aagatgaagcagacgggcc

SEQ ID NO: 15175 - DNA, 19 bp, Homo sapiens
agatgaagcagacgggcca

SEQ ID NO: 15176 - DNA, 19 bp, Homo sapiens
gatgaagcagacgggccag

SEQ ID NO: 15177 - DNA, 19 bp, Homo sapiens
atgaagcagacgggccagg

SEQ ID NO: 15178 - DNA, 19 bp, Homo sapiens
tgaagcagacgggccaggt

SEQ ID NO: 15179 - DNA, 19 bp, Homo sapiens
gaagcagacgggccaggtg

SEQ ID NO: 15180 - DNA, 19 bp, Homo sapiens
aagcagacgggccaggtgt

SEQ ID NO: 15181 - DNA, 19 bp, Homo sapiens
agcagacgggccaggtgta

SEQ ID NO: 15182 - DNA, 19 bp, Homo sapiens
gcagacgggccaggtgtat

SEQ ID NO: 15183 - DNA, 19 bp, Homo sapiens
cagacgggccaggtgtatg

SEQ ID NO: 15184 - DNA, 19 bp, Homo sapiens
agacgggccaggtgtatgc

SEQ ID NO: 15185 - DNA, 19 bp, Homo sapiens
gacgggccaggtgtatgcc

SEQ ID NO: 15186 - DNA, 19 bp, Homo sapiens
acgggccaggtgtatgcca

SEQ ID NO: 15187 - DNA, 19 bp, Homo sapiens
cgggccaggtgtatgccat

SEQ ID NO: 15188 - DNA, 19 bp, Homo sapiens
gggccaggtgtatgccatg

SEQ ID NO: 15189 - DNA, 19 bp, Homo sapiens
ggccaggtgtatgccatga

SEQ ID NO: 15190 - DNA, 19 bp, Homo sapiens
gccaggtgtatgccatgaa

SEQ ID NO: 15191 - DNA, 19 bp, Homo sapiens
ccaggtgtatgccatgaag

SEQ ID NO: 15192 - DNA, 19 bp, Homo sapiens
caggtgtatgccatgaaga

SEQ ID NO: 15193 - DNA, 19 bp, Homo sapiens
aggtgtatgccatgaagat

SEQ ID NO: 15194 - DNA, 19 bp, Homo sapiens
ggtgtatgccatgaagatc

SEQ ID NO: 15195 - DNA, 19 bp, Homo sapiens
gtgtatgccatgaagatca

SEQ ID NO: 15196 - DNA, 19 bp, Homo sapiens
tgtatgccatgaagatcat

SEQ ID NO: 15197 - DNA, 19 bp, Homo sapiens
gtatgccatgaagatcatg

SEQ ID NO: 15198 - DNA, 19 bp, Homo sapiens
tatgccatgaagatcatga

SEQ ID NO: 15199 - DNA, 19 bp, Homo sapiens
atgccatgaagatcatgaa

SEQ ID NO: 15200 - DNA, 19 bp, Homo sapiens
tgccatgaagatcatgaac

SEQ ID NO: 15201 - DNA, 19 bp, Homo sapiens
gccatgaagatcatgaaca

SEQ ID NO: 15202 - DNA, 19 bp, Homo sapiens
ccatgaagatcatgaacaa

SEQ ID NO: 15203 - DNA, 19 bp, Homo sapiens
catgaagatcatgaacaag

SEQ ID NO: 15204 - DNA, 19 bp, Homo sapiens
atgaagatcatgaacaagt

SEQ ID NO: 15205 - DNA, 19 bp, Homo sapiens
tgaagatcatgaacaagtg

SEQ ID NO: 15206 - DNA, 19 bp, Homo sapiens
gaagatcatgaacaagtgg

SEQ ID NO: 15207 - DNA, 19 bp, Homo sapiens
aagatcatgaacaagtggg

SEQ ID NO: 15208 - DNA, 19 bp, Homo sapiens
agatcatgaacaagtggga

SEQ ID NO: 15209 - DNA, 19 bp, Homo sapiens
gatcatgaacaagtgggac

SEQ ID NO: 15210 - DNA, 19 bp, Homo sapiens
atcatgaacaagtgggaca

SEQ ID NO: 15211 - DNA, 19 bp, Homo sapiens
tcatgaacaagtgggacat

SEQ ID NO: 15212 - DNA, 19 bp, Homo sapiens
catgaacaagtgggacatg

SEQ ID NO: 15213 - DNA, 19 bp, Homo sapiens
atgaacaagtgggacatgc

SEQ ID NO: 15214 - DNA, 19 bp, Homo sapiens
tgaacaagtgggacatgct

SEQ ID NO: 15215 - DNA, 19 bp, Homo sapiens
gaacaagtgggacatgctg

SEQ ID NO: 15216 - DNA, 19 bp, Homo sapiens
aacaagtgggacatgctga

SEQ ID NO: 15217 - DNA, 19 bp, Homo sapiens
acaagtgggacatgctgaa

SEQ ID NO: 15218 - DNA, 19 bp, Homo sapiens
caagtgggacatgctgaag

SEQ ID NO: 15219 - DNA, 19 bp, Homo sapiens
aagtgggacatgctgaaga

SEQ ID NO: 15220 - DNA, 19 bp, Homo sapiens
agtgggacatgctgaagag

SEQ ID NO: 15221 - DNA, 19 bp, Homo sapiens
gtgggacatgctgaagagg

SEQ ID NO: 15222 - DNA, 19 bp, Homo sapiens
tgggacatgctgaagaggg

SEQ ID NO: 15223 - DNA, 19 bp, Homo sapiens
gggacatgctgaagagggg

SEQ ID NO: 15224 - DNA, 19 bp, Homo sapiens
ggacatgctgaagaggggc

SEQ ID NO: 15225 - DNA, 19 bp, Homo sapiens
gacatgctgaagaggggcg

SEQ ID NO: 15226 - DNA, 19 bp, Homo sapiens
acatgctgaagaggggcga

SEQ ID NO: 15227 - DNA, 19 bp, Homo sapiens
catgctgaagaggggcgag

SEQ ID NO: 15228 - DNA, 19 bp, Homo sapiens
atgctgaagaggggcgagg

SEQ ID NO: 15229 - DNA, 19 bp, Homo sapiens
tgctgaagaggggcgaggt

SEQ ID NO: 15230 - DNA, 19 bp, Homo sapiens
gctgaagaggggcgaggtg

SEQ ID NO: 15231 - DNA, 19 bp, Homo sapiens
ctgaagaggggcgaggtgt

SEQ ID NO: 15232 - DNA, 19 bp, Homo sapiens
tgaagaggggcgaggtgtc

SEQ ID NO: 15233 - DNA, 19 bp, Homo sapiens
gaagaggggcgaggtgtcg

SEQ ID NO: 15234 - DNA, 19 bp, Homo sapiens
aagaggggcgaggtgtcgt

SEQ ID NO: 15235 - DNA, 19 bp, Homo sapiens
agaggggcgaggtgtcgtg

SEQ ID NO: 15236 - DNA, 19 bp, Homo sapiens
gaggggcgaggtgtcgtgc

SEQ ID NO: 15237 - DNA, 19 bp, Homo sapiens
aggggcgaggtgtcgtgct

SEQ ID NO: 15238 - DNA, 19 bp, Homo sapiens
ggggcgaggtgtcgtgctt

SEQ ID NO: 15239 - DNA, 19 bp, Homo sapiens
gggcgaggtgtcgtgcttc

SEQ ID NO: 15240 - DNA, 19 bp, Homo sapiens
ggcgaggtgtcgtgcttcc

SEQ ID NO: 15241 - DNA, 19 bp, Homo sapiens
gcgaggtgtcgtgcttccg

SEQ ID NO: 15242 - DNA, 19 bp, Homo sapiens
cgaggtgtcgtgcttccgt

SEQ ID NO: 15243 - DNA, 19 bp, Homo sapiens
gaggtgtcgtgcttccgtg

SEQ ID NO: 15244 - DNA, 19 bp, Homo sapiens
aggtgtcgtgcttccgtga

SEQ ID NO: 15245 - DNA, 19 bp, Homo sapiens
ggtgtcgtgcttccgtgag

SEQ ID NO: 15246 - DNA, 19 bp, Homo sapiens
gtgtcgtgcttccgtgagg

SEQ ID NO: 15247 - DNA, 19 bp, Homo sapiens
tgtcgtgcttccgtgagga

SEQ ID NO: 15248 - DNA, 19 bp, Homo sapiens
gtcgtgcttccgtgaggag

SEQ ID NO: 15249 - DNA, 19 bp, Homo sapiens
tcgtgcttccgtgaggaga

SEQ ID NO: 15250 - DNA, 19 bp, Homo sapiens
cgtgcttccgtgaggagag

SEQ ID NO: 15251 - DNA, 19 bp, Homo sapiens
gtgcttccgtgaggagagg

SEQ ID NO: 15252 - DNA, 19 bp, Homo sapiens
tgcttccgtgaggagaggg

SEQ ID NO: 15253 - DNA, 19 bp, Homo sapiens
gcttccgtgaggagaggga

SEQ ID NO: 15254 - DNA, 19 bp, Homo sapiens
cttccgtgaggagagggac

SEQ ID NO: 15255 - DNA, 19 bp, Homo sapiens
ttccgtgaggagagggacg

SEQ ID NO: 15256 - DNA, 19 bp, Homo sapiens
tccgtgaggagagggacgt

SEQ ID NO: 15257 - DNA, 19 bp, Homo sapiens
ccgtgaggagagggacgtg

SEQ ID NO: 15258 - DNA, 19 bp, Homo sapiens
cgtgaggagagggacgtgt

SEQ ID NO: 15259 - DNA, 19 bp, Homo sapiens
gtgaggagagggacgtgtt

SEQ ID NO: 15260 - DNA, 19 bp, Homo sapiens
tgaggagagggacgtgttg

SEQ ID NO: 15261 - DNA, 19 bp, Homo sapiens
gaggagagggacgtgttgg

SEQ ID NO: 15262 - DNA, 19 bp, Homo sapiens
aggagagggacgtgttggt

SEQ ID NO: 15263 - DNA, 19 bp, Homo sapiens
ggagagggacgtgttggtg

SEQ ID NO: 15264 - DNA, 19 bp, Homo sapiens
gagagggacgtgttggtga

SEQ ID NO: 15265 - DNA, 19 bp, Homo sapiens
agagggacgtgttggtgaa

SEQ ID NO: 15266 - DNA, 19 bp, Homo sapiens
gagggacgtgttggtgaat

SEQ ID NO: 15267 - DNA, 19 bp, Homo sapiens
agggacgtgttggtgaatg

SEQ ID NO: 15268 - DNA, 19 bp, Homo sapiens
gggacgtgttggtgaatgg

SEQ ID NO: 15269 - DNA, 19 bp, Homo sapiens
ggacgtgttggtgaatggg

SEQ ID NO: 15270 - DNA, 19 bp, Homo sapiens
gacgtgttggtgaatgggg

SEQ ID NO: 15271 - DNA, 19 bp, Homo sapiens
acgtgttggtgaatgggga

SEQ ID NO: 15272 - DNA, 19 bp, Homo sapiens
cgtgttggtgaatggggac

SEQ ID NO: 15273 - DNA, 19 bp, Homo sapiens
gtgttggtgaatggggacc

SEQ ID NO: 15274 - DNA, 19 bp, Homo sapiens
tgttggtgaatggggaccg

SEQ ID NO: 15275 - DNA, 19 bp, Homo sapiens
gttggtgaatggggaccgg

SEQ ID NO: 15276 - DNA, 19 bp, Homo sapiens
ttggtgaatggggaccggc

SEQ ID NO: 15277 - DNA, 19 bp, Homo sapiens
tggtgaatggggaccggcg

SEQ ID NO: 15278 - DNA, 19 bp, Homo sapiens
ggtgaatggggaccggcgg

SEQ ID NO: 15279 - DNA, 19 bp, Homo sapiens
gtgaatggggaccggcggt

SEQ ID NO: 15280 - DNA, 19 bp, Homo sapiens
tgaatggggaccggcggtg

SEQ ID NO: 15281 - DNA, 19 bp, Homo sapiens
gaatggggaccggcggtgg

SEQ ID NO: 15282 - DNA, 19 bp, Homo sapiens
aatggggaccggcggtgga

SEQ ID NO: 15283 - DNA, 19 bp, Homo sapiens
atggggaccggcggtggat

SEQ ID NO: 15284 - DNA, 19 bp, Homo sapiens
tggggaccggcggtggatc

SEQ ID NO: 15285 - DNA, 19 bp, Homo sapiens
ggggaccggcggtggatca

SEQ ID NO: 15286 - DNA, 19 bp, Homo sapiens
gggaccggcggtggatcac

SEQ ID NO: 15287 - DNA, 19 bp, Homo sapiens
ggaccggcggtggatcacg

SEQ ID NO: 15288 - DNA, 19 bp, Homo sapiens
gaccggcggtggatcacgc

SEQ ID NO: 15289 - DNA, 19 bp, Homo sapiens
accggcggtggatcacgca

SEQ ID NO: 15290 - DNA, 19 bp, Homo sapiens
ccggcggtggatcacgcag

SEQ ID NO: 15291 - DNA, 19 bp, Homo sapiens
cggcggtggatcacgcagc

SEQ ID NO: 15292 - DNA, 19 bp, Homo sapiens
ggcggtggatcacgcagct

SEQ ID NO: 15293 - DNA, 19 bp, Homo sapiens
gcggtggatcacgcagctg

SEQ ID NO: 15294 - DNA, 19 bp, Homo sapiens
cggtggatcacgcagctgc

SEQ ID NO: 15295 - DNA, 19 bp, Homo sapiens
ggtggatcacgcagctgca

SEQ ID NO: 15296 - DNA, 19 bp, Homo sapiens
gtggatcacgcagctgcac

SEQ ID NO: 15297 - DNA, 19 bp, Homo sapiens
tggatcacgcagctgcact

SEQ ID NO: 15298 - DNA, 19 bp, Homo sapiens
ggatcacgcagctgcactt

SEQ ID NO: 15299 - DNA, 19 bp, Homo sapiens
gatcacgcagctgcacttc

SEQ ID NO: 15300 - DNA, 19 bp, Homo sapiens
atcacgcagctgcacttcg

SEQ ID NO: 15301 - DNA, 19 bp, Homo sapiens
tcacgcagctgcacttcgc

SEQ ID NO: 15302 - DNA, 19 bp, Homo sapiens
cacgcagctgcacttcgcc

SEQ ID NO: 15303 - DNA, 19 bp, Homo sapiens
acgcagctgcacttcgcct

SEQ ID NO: 15304 - DNA, 19 bp, Homo sapiens
cgcagctgcacttcgcctt

SEQ ID NO: 15305 - DNA, 19 bp, Homo sapiens
gcagctgcacttcgccttc

SEQ ID NO: 15306 - DNA, 19 bp, Homo sapiens
cagctgcacttcgccttcc

SEQ ID NO: 15307 - DNA, 19 bp, Homo sapiens
agctgcacttcgccttcca

SEQ ID NO: 15308 - DNA, 19 bp, Homo sapiens
gctgcacttcgccttccag

SEQ ID NO: 15309 - DNA, 19 bp, Homo sapiens
ctgcacttcgccttccagg

SEQ ID NO: 15310 - DNA, 19 bp, Homo sapiens
tgcacttcgccttccagga

SEQ ID NO: 15311 - DNA, 19 bp, Homo sapiens
gcacttcgccttccaggat

SEQ ID NO: 15312 - DNA, 19 bp, Homo sapiens
cacttcgccttccaggatg

SEQ ID NO: 15313 - DNA, 19 bp, Homo sapiens
acttcgccttccaggatga

SEQ ID NO: 15314 - DNA, 19 bp, Homo sapiens
cttcgccttccaggatgag

SEQ ID NO: 15315 - DNA, 19 bp, Homo sapiens
ttcgccttccaggatgaga

SEQ ID NO: 15316 - DNA, 19 bp, Homo sapiens
tcgccttccaggatgagaa

SEQ ID NO: 15317 - DNA, 19 bp, Homo sapiens
cgccttccaggatgagaac

SEQ ID NO: 15318 - DNA, 19 bp, Homo sapiens
gccttccaggatgagaact

SEQ ID NO: 15319 - DNA, 19 bp, Homo sapiens
ccttccaggatgagaacta

SEQ ID NO: 15320 - DNA, 19 bp, Homo sapiens
cttccaggatgagaactac

SEQ ID NO: 15321 - DNA, 19 bp, Homo sapiens
ttccaggatgagaactacc

SEQ ID NO: 15322 - DNA, 19 bp, Homo sapiens
tccaggatgagaactacct

SEQ ID NO: 15323 - DNA, 19 bp, Homo sapiens
ccaggatgagaactacctg

SEQ ID NO: 15324 - DNA, 19 bp, Homo sapiens
caggatgagaactacctgt

SEQ ID NO: 15325 - DNA, 19 bp, Homo sapiens
aggatgagaactacctgta

SEQ ID NO: 15326 - DNA, 19 bp, Homo sapiens
ggatgagaactacctgtac

SEQ ID NO: 15327 - DNA, 19 bp, Homo sapiens
gatgagaactacctgtacc

SEQ ID NO: 15328 - DNA, 19 bp, Homo sapiens
atgagaactacctgtacct

SEQ ID NO: 15329 - DNA, 19 bp, Homo sapiens
tgagaactacctgtacctg

SEQ ID NO: 15330 - DNA, 19 bp, Homo sapiens
gagaactacctgtacctgg

SEQ ID NO: 15331 - DNA, 19 bp, Homo sapiens
agaactacctgtacctggt

SEQ ID NO: 15332 - DNA, 19 bp, Homo sapiens
gaactacctgtacctggtc

SEQ ID NO: 15333 - DNA, 19 bp, Homo sapiens
aactacctgtacctggtca

SEQ ID NO: 15334 - DNA, 19 bp, Homo sapiens
actacctgtacctggtcat

SEQ ID NO: 15335 - DNA, 19 bp, Homo sapiens
ctacctgtacctggtcatg

SEQ ID NO: 15336 - DNA, 19 bp, Homo sapiens
tacctgtacctggtcatgg

SEQ ID NO: 15337 - DNA, 19 bp, Homo sapiens
acctgtacctggtcatgga

SEQ ID NO: 15338 - DNA, 19 bp, Homo sapiens
cctgtacctggtcatggag

SEQ ID NO: 15339 - DNA, 19 bp, Homo sapiens
ctgtacctggtcatggagt

SEQ ID NO: 15340 - DNA, 19 bp, Homo sapiens
tgtacctggtcatggagta

SEQ ID NO: 15341 - DNA, 19 bp, Homo sapiens
gtacctggtcatggagtat

SEQ ID NO: 15342 - DNA, 19 bp, Homo sapiens
tacctggtcatggagtatt

SEQ ID NO: 15343 - DNA, 19 bp, Homo sapiens
acctggtcatggagtatta

SEQ ID NO: 15344 - DNA, 19 bp, Homo sapiens
cctggtcatggagtattac

SEQ ID NO: 15345 - DNA, 19 bp, Homo sapiens
ctggtcatggagtattacg

SEQ ID NO: 15346 - DNA, 19 bp, Homo sapiens
tggtcatggagtattacgt

SEQ ID NO: 15347 - DNA, 19 bp, Homo sapiens
ggtcatggagtattacgtg

SEQ ID NO: 15348 - DNA, 19 bp, Homo sapiens
gtcatggagtattacgtgg

SEQ ID NO: 15349 - DNA, 19 bp, Homo sapiens
tcatggagtattacgtggg

SEQ ID NO: 15350 - DNA, 19 bp, Homo sapiens
catggagtattacgtgggc

SEQ ID NO: 15351 - DNA, 19 bp, Homo sapiens
atggagtattacgtgggcg

SEQ ID NO: 15352 - DNA, 19 bp, Homo sapiens
tggagtattacgtgggcgg

SEQ ID NO: 15353 - DNA, 19 bp, Homo sapiens
ggagtattacgtgggcggg

SEQ ID NO: 15354 - DNA, 19 bp, Homo sapiens
gagtattacgtgggcgggg

SEQ ID NO: 15355 - DNA, 19 bp, Homo sapiens
agtattacgtgggcgggga

SEQ ID NO: 15356 - DNA, 19 bp, Homo sapiens
gtattacgtgggcggggac

SEQ ID NO: 15357 - DNA, 19 bp, Homo sapiens
tattacgtgggcggggacc

SEQ ID NO: 15358 - DNA, 19 bp, Homo sapiens
attacgtgggcggggacct

SEQ ID NO: 15359 - DNA, 19 bp, Homo sapiens
ttacgtgggcggggacctg

SEQ ID NO: 15360 - DNA, 19 bp, Homo sapiens
tacgtgggcggggacctgc

SEQ ID NO: 15361 - DNA, 19 bp, Homo sapiens
acgtgggcggggacctgct

SEQ ID NO: 15362 - DNA, 19 bp, Homo sapiens
cgtgggcggggacctgctg

SEQ ID NO: 15363 - DNA, 19 bp, Homo sapiens
gtgggcggggacctgctga

SEQ ID NO: 15364 - DNA, 19 bp, Homo sapiens
tgggcggggacctgctgac

SEQ ID NO: 15365 - DNA, 19 bp, Homo sapiens
gggcggggacctgctgaca

SEQ ID NO: 15366 - DNA, 19 bp, Homo sapiens
ggcggggacctgctgacac

SEQ ID NO: 15367 - DNA, 19 bp, Homo sapiens
gcggggacctgctgacact

SEQ ID NO: 15368 - DNA, 19 bp, Homo sapiens
cggggacctgctgacactg

SEQ ID NO: 15369 - DNA, 19 bp, Homo sapiens
ggggacctgctgacactgc

SEQ ID NO: 15370 - DNA, 19 bp, Homo sapiens
gggacctgctgacactgct

SEQ ID NO: 15371 - DNA, 19 bp, Homo sapiens
ggacctgctgacactgctg

SEQ ID NO: 15372 - DNA, 19 bp, Homo sapiens
gacctgctgacactgctga

SEQ ID NO: 15373 - DNA, 19 bp, Homo sapiens
acctgctgacactgctgag

SEQ ID NO: 15374 - DNA, 19 bp, Homo sapiens
cctgctgacactgctgagc

SEQ ID NO: 15375 - DNA, 19 bp, Homo sapiens
ctgctgacactgctgagca

SEQ ID NO: 15376 - DNA, 19 bp, Homo sapiens
tgctgacactgctgagcaa

SEQ ID NO: 15377 - DNA, 19 bp, Homo sapiens
gctgacactgctgagcaag

SEQ ID NO: 15378 - DNA, 19 bp, Homo sapiens
ctgacactgctgagcaagt

SEQ ID NO: 15379 - DNA, 19 bp, Homo sapiens
tgacactgctgagcaagtt

SEQ ID NO: 15380 - DNA, 19 bp, Homo sapiens
gacactgctgagcaagttt

SEQ ID NO: 15381 - DNA, 19 bp, Homo sapiens
acactgctgagcaagtttg

SEQ ID NO: 15382 - DNA, 19 bp, Homo sapiens
cactgctgagcaagtttgg

SEQ ID NO: 15383 - DNA, 19 bp, Homo sapiens
actgctgagcaagtttggg

SEQ ID NO: 15384 - DNA, 19 bp, Homo sapiens
ctgctgagcaagtttgggg

SEQ ID NO: 15385 - DNA, 19 bp, Homo sapiens
tgctgagcaagtttgggga

SEQ ID NO: 15386 - DNA, 19 bp, Homo sapiens
gctgagcaagtttggggag

SEQ ID NO: 15387 - DNA, 19 bp, Homo sapiens
ctgagcaagtttggggagc

SEQ ID NO: 15388 - DNA, 19 bp, Homo sapiens
tgagcaagtttggggagcg

SEQ ID NO: 15389 - DNA, 19 bp, Homo sapiens
gagcaagtttggggagcgg

SEQ ID NO: 15390 - DNA, 19 bp, Homo sapiens
agcaagtttggggagcgga

SEQ ID NO: 15391 - DNA, 19 bp, Homo sapiens
gcaagtttggggagcggat

SEQ ID NO: 15392 - DNA, 19 bp, Homo sapiens
caagtttggggagcggatt

SEQ ID NO: 15393 - DNA, 19 bp, Homo sapiens
aagtttggggagcggattc

SEQ ID NO: 15394 - DNA, 19 bp, Homo sapiens
agtttggggagcggattcc

SEQ ID NO: 15395 - DNA, 19 bp, Homo sapiens
gtttggggagcggattccg

SEQ ID NO: 15396 - DNA, 19 bp, Homo sapiens
tttggggagcggattccgg

SEQ ID NO: 15397 - DNA, 19 bp, Homo sapiens
ttggggagcggattccggc

SEQ ID NO: 15398 - DNA, 19 bp, Homo sapiens
tggggagcggattccggcc

SEQ ID NO: 15399 - DNA, 19 bp, Homo sapiens
ggggagcggattccggccg

SEQ ID NO: 15400 - DNA, 19 bp, Homo sapiens
gggagcggattccggccga

SEQ ID NO: 15401 - DNA, 19 bp, Homo sapiens
ggagcggattccggccgag

SEQ ID NO: 15402 - DNA, 19 bp, Homo sapiens
gagcggattccggccgaga

SEQ ID NO: 15403 - DNA, 19 bp, Homo sapiens
agcggattccggccgagat

SEQ ID NO: 15404 - DNA, 19 bp, Homo sapiens
gcggattccggccgagatg

SEQ ID NO: 15405 - DNA, 19 bp, Homo sapiens
cggattccggccgagatgg

SEQ ID NO: 15406 - DNA, 19 bp, Homo sapiens
ggattccggccgagatggc

SEQ ID NO: 15407 - DNA, 19 bp, Homo sapiens
gattccggccgagatggcg

SEQ ID NO: 15408 - DNA, 19 bp, Homo sapiens
attccggccgagatggcgc

SEQ ID NO: 15409 - DNA, 19 bp, Homo sapiens
ttccggccgagatggcgcg

SEQ ID NO: 15410 - DNA, 19 bp, Homo sapiens
tccggccgagatggcgcgc

SEQ ID NO: 15411 - DNA, 19 bp, Homo sapiens
ccggccgagatggcgcgct

SEQ ID NO: 15412 - DNA, 19 bp, Homo sapiens
cggccgagatggcgcgctt

SEQ ID NO: 15413 - DNA, 19 bp, Homo sapiens
ggccgagatggcgcgcttc

SEQ ID NO: 15414 - DNA, 19 bp, Homo sapiens
gccgagatggcgcgcttct

SEQ ID NO: 15415 - DNA, 19 bp, Homo sapiens
ccgagatggcgcgcttcta

SEQ ID NO: 15416 - DNA, 19 bp, Homo sapiens
cgagatggcgcgcttctac

SEQ ID NO: 15417 - DNA, 19 bp, Homo sapiens
gagatggcgcgcttctacc

SEQ ID NO: 15418 - DNA, 19 bp, Homo sapiens
agatggcgcgcttctacct

SEQ ID NO: 15419 - DNA, 19 bp, Homo sapiens
gatggcgcgcttctacctg

SEQ ID NO: 15420 - DNA, 19 bp, Homo sapiens
atggcgcgcttctacctgg

SEQ ID NO: 15421 - DNA, 19 bp, Homo sapiens
tggcgcgcttctacctggc

SEQ ID NO: 15422 - DNA, 19 bp, Homo sapiens
ggcgcgcttctacctggcg

SEQ ID NO: 15423 - DNA, 19 bp, Homo sapiens
gcgcgcttctacctggcgg

SEQ ID NO: 15424 - DNA, 19 bp, Homo sapiens
cgcgcttctacctggcgga

SEQ ID NO: 15425 - DNA, 19 bp, Homo sapiens
gcgcttctacctggcggag

SEQ ID NO: 15426 - DNA, 19 bp, Homo sapiens
cgcttctacctggcggaga

SEQ ID NO: 15427 - DNA, 19 bp, Homo sapiens
gcttctacctggcggagat

SEQ ID NO: 15428 - DNA, 19 bp, Homo sapiens
cttctacctggcggagatt

SEQ ID NO: 15429 - DNA, 19 bp, Homo sapiens
ttctacctggcggagattg

SEQ ID NO: 15430 - DNA, 19 bp, Homo sapiens
tctacctggcggagattgt

SEQ ID NO: 15431 - DNA, 19 bp, Homo sapiens
ctacctggcggagattgtc

SEQ ID NO: 15432 - DNA, 19 bp, Homo sapiens
tacctggcggagattgtca

SEQ ID NO: 15433 - DNA, 19 bp, Homo sapiens
acctggcggagattgtcat

SEQ ID NO: 15434 - DNA, 19 bp, Homo sapiens
cctggcggagattgtcatg

SEQ ID NO: 15435 - DNA, 19 bp, Homo sapiens
ctggcggagattgtcatgg

SEQ ID NO: 15436 - DNA, 19 bp, Homo sapiens
tggcggagattgtcatggc

SEQ ID NO: 15437 - DNA, 19 bp, Homo sapiens
ggcggagattgtcatggcc

SEQ ID NO: 15438 - DNA, 19 bp, Homo sapiens
gcggagattgtcatggcca

SEQ ID NO: 15439 - DNA, 19 bp, Homo sapiens
cggagattgtcatggccat

SEQ ID NO: 15440 - DNA, 19 bp, Homo sapiens
ggagattgtcatggccata

SEQ ID NO: 15441 - DNA, 19 bp, Homo sapiens
gagattgtcatggccatag

SEQ ID NO: 15442 - DNA, 19 bp, Homo sapiens
agattgtcatggccataga

SEQ ID NO: 15443 - DNA, 19 bp, Homo sapiens
gattgtcatggccatagac

SEQ ID NO: 15444 - DNA, 19 bp, Homo sapiens
attgtcatggccatagact

SEQ ID NO: 15445 - DNA, 19 bp, Homo sapiens
ttgtcatggccatagactc

SEQ ID NO: 15446 - DNA, 19 bp, Homo sapiens
tgtcatggccatagactcg

SEQ ID NO: 15447 - DNA, 19 bp, Homo sapiens
gtcatggccatagactcgg

SEQ ID NO: 15448 - DNA, 19 bp, Homo sapiens
tcatggccatagactcggt

SEQ ID NO: 15449 - DNA, 19 bp, Homo sapiens
catggccatagactcggtg

SEQ ID NO: 15450 - DNA, 19 bp, Homo sapiens
atggccatagactcggtgc

SEQ ID NO: 15451 - DNA, 19 bp, Homo sapiens
tggccatagactcggtgca

SEQ ID NO: 15452 - DNA, 19 bp, Homo sapiens
ggccatagactcggtgcac

SEQ ID NO: 15453 - DNA, 19 bp, Homo sapiens
gccatagactcggtgcacc

SEQ ID NO: 15454 - DNA, 19 bp, Homo sapiens
ccatagactcggtgcaccg

SEQ ID NO: 15455 - DNA, 19 bp, Homo sapiens
catagactcggtgcaccgg

SEQ ID NO: 15456 - DNA, 19 bp, Homo sapiens
atagactcggtgcaccggc

SEQ ID NO: 15457 - DNA, 19 bp, Homo sapiens
tagactcggtgcaccggct

SEQ ID NO: 15458 - DNA, 19 bp, Homo sapiens
agactcggtgcaccggctt

SEQ ID NO: 15459 - DNA, 19 bp, Homo sapiens
gactcggtgcaccggcttg

SEQ ID NO: 15460 - DNA, 19 bp, Homo sapiens
actcggtgcaccggcttgg

SEQ ID NO: 15461 - DNA, 19 bp, Homo sapiens
ctcggtgcaccggcttggc

SEQ ID NO: 15462 - DNA, 19 bp, Homo sapiens
tcggtgcaccggcttggct

SEQ ID NO: 15463 - DNA, 19 bp, Homo sapiens
cggtgcaccggcttggcta

SEQ ID NO: 15464 - DNA, 19 bp, Homo sapiens
ggtgcaccggcttggctac

SEQ ID NO: 15465 - DNA, 19 bp, Homo sapiens
gtgcaccggcttggctacg

SEQ ID NO: 15466 - DNA, 19 bp, Homo sapiens
tgcaccggcttggctacgt

SEQ ID NO: 15467 - DNA, 19 bp, Homo sapiens
gcaccggcttggctacgtg

SEQ ID NO: 15468 - DNA, 19 bp, Homo sapiens
caccggcttggctacgtgc

SEQ ID NO: 15469 - DNA, 19 bp, Homo sapiens
accggcttggctacgtgca

SEQ ID NO: 15470 - DNA, 19 bp, Homo sapiens
ccggcttggctacgtgcac

SEQ ID NO: 15471 - DNA, 19 bp, Homo sapiens
cggcttggctacgtgcaca

SEQ ID NO: 15472 - DNA, 19 bp, Homo sapiens
ggcttggctacgtgcacag

SEQ ID NO: 15473 - DNA, 19 bp, Homo sapiens
gcttggctacgtgcacagg

SEQ ID NO: 15474 - DNA, 19 bp, Homo sapiens
cttggctacgtgcacaggg

SEQ ID NO: 15475 - DNA, 19 bp, Homo sapiens
ttggctacgtgcacaggga

SEQ ID NO: 15476 - DNA, 19 bp, Homo sapiens
tggctacgtgcacagggac

SEQ ID NO: 15477 - DNA, 19 bp, Homo sapiens
ggctacgtgcacagggaca

SEQ ID NO: 15478 - DNA, 19 bp, Homo sapiens
gctacgtgcacagggacat

SEQ ID NO: 15479 - DNA, 19 bp, Homo sapiens
ctacgtgcacagggacatc

SEQ ID NO: 15480 - DNA, 19 bp, Homo sapiens
tacgtgcacagggacatca

SEQ ID NO: 15481 - DNA, 19 bp, Homo sapiens
acgtgcacagggacatcaa

SEQ ID NO: 15482 - DNA, 19 bp, Homo sapiens
cgtgcacagggacatcaaa

SEQ ID NO: 15483 - DNA, 19 bp, Homo sapiens
gtgcacagggacatcaaac

SEQ ID NO: 15484 - DNA, 19 bp, Homo sapiens
tgcacagggacatcaaacc

SEQ ID NO: 15485 - DNA, 19 bp, Homo sapiens
gcacagggacatcaaaccc

SEQ ID NO: 15486 - DNA, 19 bp, Homo sapiens
cacagggacatcaaacccg

SEQ ID NO: 15487 - DNA, 19 bp, Homo sapiens
acagggacatcaaacccga

SEQ ID NO: 15488 - DNA, 19 bp, Homo sapiens
cagggacatcaaacccgac

SEQ ID NO: 15489 - DNA, 19 bp, Homo sapiens
agggacatcaaacccgaca

SEQ ID NO: 15490 - DNA, 19 bp, Homo sapiens
gggacatcaaacccgacaa

SEQ ID NO: 15491 - DNA, 19 bp, Homo sapiens
ggacatcaaacccgacaac

SEQ ID NO: 15492 - DNA, 19 bp, Homo sapiens
gacatcaaacccgacaaca

SEQ ID NO: 15493 - DNA, 19 bp, Homo sapiens
acatcaaacccgacaacat

SEQ ID NO: 15494 - DNA, 19 bp, Homo sapiens
catcaaacccgacaacatc

SEQ ID NO: 15495 - DNA, 19 bp, Homo sapiens
atcaaacccgacaacatcc

SEQ ID NO: 15496 - DNA, 19 bp, Homo sapiens
tcaaacccgacaacatcct

SEQ ID NO: 15497 - DNA, 19 bp, Homo sapiens
caaacccgacaacatcctg

SEQ ID NO: 15498 - DNA, 19 bp, Homo sapiens
aaacccgacaacatcctgc

SEQ ID NO: 15499 - DNA, 19 bp, Homo sapiens
aacccgacaacatcctgct

SEQ ID NO: 15500 - DNA, 19 bp, Homo sapiens
acccgacaacatcctgctg

SEQ ID NO: 15501 - DNA, 19 bp, Homo sapiens
cccgacaacatcctgctgg

SEQ ID NO: 15502 - DNA, 19 bp, Homo sapiens
ccgacaacatcctgctgga

SEQ ID NO: 15503 - DNA, 19 bp, Homo sapiens
cgacaacatcctgctggac

SEQ ID NO: 15504 - DNA, 19 bp, Homo sapiens
gacaacatcctgctggacc

SEQ ID NO: 15505 - DNA, 19 bp, Homo sapiens
acaacatcctgctggaccg

SEQ ID NO: 15506 - DNA, 19 bp, Homo sapiens
caacatcctgctggaccgc

SEQ ID NO: 15507 - DNA, 19 bp, Homo sapiens
aacatcctgctggaccgct

SEQ ID NO: 15508 - DNA, 19 bp, Homo sapiens
acatcctgctggaccgctg

SEQ ID NO: 15509 - DNA, 19 bp, Homo sapiens
catcctgctggaccgctgt

SEQ ID NO: 15510 - DNA, 19 bp, Homo sapiens
atcctgctggaccgctgtg

SEQ ID NO: 15511 - DNA, 19 bp, Homo sapiens
tcctgctggaccgctgtgg

SEQ ID NO: 15512 - DNA, 19 bp, Homo sapiens
cctgctggaccgctgtggc

SEQ ID NO: 15513 - DNA, 19 bp, Homo sapiens
ctgctggaccgctgtggcc

SEQ ID NO: 15514 - DNA, 19 bp, Homo sapiens
tgctggaccgctgtggcca

SEQ ID NO: 15515 - DNA, 19 bp, Homo sapiens
gctggaccgctgtggccac

SEQ ID NO: 15516 - DNA, 19 bp, Homo sapiens
ctggaccgctgtggccaca

SEQ ID NO: 15517 - DNA, 19 bp, Homo sapiens
tggaccgctgtggccacat

SEQ ID NO: 15518 - DNA, 19 bp, Homo sapiens
ggaccgctgtggccacatc

SEQ ID NO: 15519 - DNA, 19 bp, Homo sapiens
gaccgctgtggccacatcc

SEQ ID NO: 15520 - DNA, 19 bp, Homo sapiens
accgctgtggccacatccg

SEQ ID NO: 15521 - DNA, 19 bp, Homo sapiens
ccgctgtggccacatccgc

SEQ ID NO: 15522 - DNA, 19 bp, Homo sapiens
cgctgtggccacatccgcc

SEQ ID NO: 15523 - DNA, 19 bp, Homo sapiens
gctgtggccacatccgcct

SEQ ID NO: 15524 - DNA, 19 bp, Homo sapiens
ctgtggccacatccgcctg

SEQ ID NO: 15525 - DNA, 19 bp, Homo sapiens
tgtggccacatccgcctgg

SEQ ID NO: 15526 - DNA, 19 bp, Homo sapiens
gtggccacatccgcctggc

SEQ ID NO: 15527 - DNA, 19 bp, Homo sapiens
tggccacatccgcctggcc

SEQ ID NO: 15528 - DNA, 19 bp, Homo sapiens
ggccacatccgcctggccg

SEQ ID NO: 15529 - DNA, 19 bp, Homo sapiens
gccacatccgcctggccga

SEQ ID NO: 15530 - DNA, 19 bp, Homo sapiens
ccacatccgcctggccgac

SEQ ID NO: 15531 - DNA, 19 bp, Homo sapiens
cacatccgcctggccgact

SEQ ID NO: 15532 - DNA, 19 bp, Homo sapiens
acatccgcctggccgactt

SEQ ID NO: 15533 - DNA, 19 bp, Homo sapiens
catccgcctggccgacttc

SEQ ID NO: 15534 - DNA, 19 bp, Homo sapiens
atccgcctggccgacttcg

SEQ ID NO: 15535 - DNA, 19 bp, Homo sapiens
tccgcctggccgacttcgg

SEQ ID NO: 15536 - DNA, 19 bp, Homo sapiens
ccgcctggccgacttcggc

SEQ ID NO: 15537 - DNA, 19 bp, Homo sapiens
cgcctggccgacttcggct

SEQ ID NO: 15538 - DNA, 19 bp, Homo sapiens
gcctggccgacttcggctc

SEQ ID NO: 15539 - DNA, 19 bp, Homo sapiens
cctggccgacttcggctct

SEQ ID NO: 15540 - DNA, 19 bp, Homo sapiens
ctggccgacttcggctctt

SEQ ID NO: 15541 - DNA, 19 bp, Homo sapiens
tggccgacttcggctcttg

SEQ ID NO: 15542 - DNA, 19 bp, Homo sapiens
ggccgacttcggctcttgc

SEQ ID NO: 15543 - DNA, 19 bp, Homo sapiens
gccgacttcggctcttgcc

SEQ ID NO: 15544 - DNA, 19 bp, Homo sapiens
ccgacttcggctcttgcct

SEQ ID NO: 15545 - DNA, 19 bp, Homo sapiens
cgacttcggctcttgcctc

SEQ ID NO: 15546 - DNA, 19 bp, Homo sapiens
gacttcggctcttgcctca

SEQ ID NO: 15547 - DNA, 19 bp, Homo sapiens
acttcggctcttgcctcaa

SEQ ID NO: 15548 - DNA, 19 bp, Homo sapiens
cttcggctcttgcctcaag

SEQ ID NO: 15549 - DNA, 19 bp, Homo sapiens
ttcggctcttgcctcaagc

SEQ ID NO: 15550 - DNA, 19 bp, Homo sapiens
tcggctcttgcctcaagct

SEQ ID NO: 15551 - DNA, 19 bp, Homo sapiens
cggctcttgcctcaagctg

SEQ ID NO: 15552 - DNA, 19 bp, Homo sapiens
ggctcttgcctcaagctgc

SEQ ID NO: 15553 - DNA, 19 bp, Homo sapiens
gctcttgcctcaagctgcg

SEQ ID NO: 15554 - DNA, 19 bp, Homo sapiens
ctcttgcctcaagctgcgg

SEQ ID NO: 15555 - DNA, 19 bp, Homo sapiens
tcttgcctcaagctgcggg

SEQ ID NO: 15556 - DNA, 19 bp, Homo sapiens
cttgcctcaagctgcgggc

SEQ ID NO: 15557 - DNA, 19 bp, Homo sapiens
ttgcctcaagctgcgggca

SEQ ID NO: 15558 - DNA, 19 bp, Homo sapiens
tgcctcaagctgcgggcag

SEQ ID NO: 15559 - DNA, 19 bp, Homo sapiens
gcctcaagctgcgggcaga

SEQ ID NO: 15560 - DNA, 19 bp, Homo sapiens
cctcaagctgcgggcagat

SEQ ID NO: 15561 - DNA, 19 bp, Homo sapiens
ctcaagctgcgggcagatg

SEQ ID NO: 15562 - DNA, 19 bp, Homo sapiens
tcaagctgcgggcagatgg

SEQ ID NO: 15563 - DNA, 19 bp, Homo sapiens
caagctgcgggcagatgga

SEQ ID NO: 15564 - DNA, 19 bp, Homo sapiens
aagctgcgggcagatggaa

SEQ ID NO: 15565 - DNA, 19 bp, Homo sapiens
agctgcgggcagatggaac

SEQ ID NO: 15566 - DNA, 19 bp, Homo sapiens
gctgcgggcagatggaacg

SEQ ID NO: 15567 - DNA, 19 bp, Homo sapiens
ctgcgggcagatggaacgg

SEQ ID NO: 15568 - DNA, 19 bp, Homo sapiens
tgcgggcagatggaacggt

SEQ ID NO: 15569 - DNA, 19 bp, Homo sapiens
gcgggcagatggaacggtg

SEQ ID NO: 15570 - DNA, 19 bp, Homo sapiens
cgggcagatggaacggtgc

SEQ ID NO: 15571 - DNA, 19 bp, Homo sapiens
gggcagatggaacggtgcg

SEQ ID NO: 15572 - DNA, 19 bp, Homo sapiens
ggcagatggaacggtgcgg

SEQ ID NO: 15573 - DNA, 19 bp, Homo sapiens
gcagatggaacggtgcggt

SEQ ID NO: 15574 - DNA, 19 bp, Homo sapiens
cagatggaacggtgcggtc

SEQ ID NO: 15575 - DNA, 19 bp, Homo sapiens
agatggaacggtgcggtcg

SEQ ID NO: 15576 - DNA, 19 bp, Homo sapiens
gatggaacggtgcggtcgc

SEQ ID NO: 15577 - DNA, 19 bp, Homo sapiens
atggaacggtgcggtcgct

SEQ ID NO: 15578 - DNA, 19 bp, Homo sapiens
tggaacggtgcggtcgctg

SEQ ID NO: 15579 - DNA, 19 bp, Homo sapiens
ggaacggtgcggtcgctgg

SEQ ID NO: 15580 - DNA, 19 bp, Homo sapiens
gaacggtgcggtcgctggt

SEQ ID NO: 15581 - DNA, 19 bp, Homo sapiens
aacggtgcggtcgctggtg

SEQ ID NO: 15582 - DNA, 19 bp, Homo sapiens
acggtgcggtcgctggtgg

SEQ ID NO: 15583 - DNA, 19 bp, Homo sapiens
cggtgcggtcgctggtggc

SEQ ID NO: 15584 - DNA, 19 bp, Homo sapiens
ggtgcggtcgctggtggct

SEQ ID NO: 15585 - DNA, 19 bp, Homo sapiens
gtgcggtcgctggtggctg

SEQ ID NO: 15586 - DNA, 19 bp, Homo sapiens
tgcggtcgctggtggctgt

SEQ ID NO: 15587 - DNA, 19 bp, Homo sapiens
gcggtcgctggtggctgtg

SEQ ID NO: 15588 - DNA, 19 bp, Homo sapiens
cggtcgctggtggctgtgg

SEQ ID NO: 15589 - DNA, 19 bp, Homo sapiens
ggtcgctggtggctgtggg

SEQ ID NO: 15590 - DNA, 19 bp, Homo sapiens
gtcgctggtggctgtgggc

SEQ ID NO: 15591 - DNA, 19 bp, Homo sapiens
tcgctggtggctgtgggca

SEQ ID NO: 15592 - DNA, 19 bp, Homo sapiens
cgctggtggctgtgggcac

SEQ ID NO: 15593 - DNA, 19 bp, Homo sapiens
gctggtggctgtgggcacc

SEQ ID NO: 15594 - DNA, 19 bp, Homo sapiens
ctggtggctgtgggcaccc

SEQ ID NO: 15595 - DNA, 19 bp, Homo sapiens
tggtggctgtgggcacccc

SEQ ID NO: 15596 - DNA, 19 bp, Homo sapiens
ggtggctgtgggcacccca

SEQ ID NO: 15597 - DNA, 19 bp, Homo sapiens
gtggctgtgggcaccccag

SEQ ID NO: 15598 - DNA, 19 bp, Homo sapiens
tggctgtgggcaccccaga

SEQ ID NO: 15599 - DNA, 19 bp, Homo sapiens
ggctgtgggcaccccagac

SEQ ID NO: 15600 - DNA, 19 bp, Homo sapiens
gctgtgggcaccccagact

SEQ ID NO: 15601 - DNA, 19 bp, Homo sapiens
ctgtgggcaccccagacta

SEQ ID NO: 15602 - DNA, 19 bp, Homo sapiens
tgtgggcaccccagactac

SEQ ID NO: 15603 - DNA, 19 bp, Homo sapiens
gtgggcaccccagactacc

SEQ ID NO: 15604 - DNA, 19 bp, Homo sapiens
tgggcaccccagactacct

SEQ ID NO: 15605 - DNA, 19 bp, Homo sapiens
gggcaccccagactacctg

SEQ ID NO: 15606 - DNA, 19 bp, Homo sapiens
ggcaccccagactacctgt

SEQ ID NO: 15607 - DNA, 19 bp, Homo sapiens
gcaccccagactacctgtc

SEQ ID NO: 15608 - DNA, 19 bp, Homo sapiens
caccccagactacctgtcc

SEQ ID NO: 15609 - DNA, 19 bp, Homo sapiens
accccagactacctgtccc

SEQ ID NO: 15610 - DNA, 19 bp, Homo sapiens
ccccagactacctgtcccc

SEQ ID NO: 15611 - DNA, 19 bp, Homo sapiens
cccagactacctgtccccc

SEQ ID NO: 15612 - DNA, 19 bp, Homo sapiens
ccagactacctgtcccccg

SEQ ID NO: 15613 - DNA, 19 bp, Homo sapiens
cagactacctgtcccccga

SEQ ID NO: 15614 - DNA, 19 bp, Homo sapiens
agactacctgtcccccgag

SEQ ID NO: 15615 - DNA, 19 bp, Homo sapiens
gactacctgtcccccgaga

SEQ ID NO: 15616 - DNA, 19 bp, Homo sapiens
actacctgtcccccgagat

SEQ ID NO: 15617 - DNA, 19 bp, Homo sapiens
ctacctgtcccccgagatc

SEQ ID NO: 15618 - DNA, 19 bp, Homo sapiens
tacctgtcccccgagatcc

SEQ ID NO: 15619 - DNA, 19 bp, Homo sapiens
acctgtcccccgagatcct

SEQ ID NO: 15620 - DNA, 19 bp, Homo sapiens
cctgtcccccgagatcctg

SEQ ID NO: 15621 - DNA, 19 bp, Homo sapiens
ctgtcccccgagatcctgc

SEQ ID NO: 15622 - DNA, 19 bp, Homo sapiens
tgtcccccgagatcctgca

SEQ ID NO: 15623 - DNA, 19 bp, Homo sapiens
gtcccccgagatcctgcag

SEQ ID NO: 15624 - DNA, 19 bp, Homo sapiens
tcccccgagatcctgcagg

SEQ ID NO: 15625 - DNA, 19 bp, Homo sapiens
cccccgagatcctgcaggc

SEQ ID NO: 15626 - DNA, 19 bp, Homo sapiens
ccccgagatcctgcaggct

SEQ ID NO: 15627 - DNA, 19 bp, Homo sapiens
cccgagatcctgcaggctg

SEQ ID NO: 15628 - DNA, 19 bp, Homo sapiens
ccgagatcctgcaggctgt

SEQ ID NO: 15629 - DNA, 19 bp, Homo sapiens
cgagatcctgcaggctgtg

SEQ ID NO: 15630 - DNA, 19 bp, Homo sapiens
gagatcctgcaggctgtgg

SEQ ID NO: 15631 - DNA, 19 bp, Homo sapiens
agatcctgcaggctgtggg

SEQ ID NO: 15632 - DNA, 19 bp, Homo sapiens
gatcctgcaggctgtgggc

SEQ ID NO: 15633 - DNA, 19 bp, Homo sapiens
atcctgcaggctgtgggcg

SEQ ID NO: 15634 - DNA, 19 bp, Homo sapiens
tcctgcaggctgtgggcgg

SEQ ID NO: 15635 - DNA, 19 bp, Homo sapiens
cctgcaggctgtgggcggt

SEQ ID NO: 15636 - DNA, 19 bp, Homo sapiens
ctgcaggctgtgggcggtg

SEQ ID NO: 15637 - DNA, 19 bp, Homo sapiens
tgcaggctgtgggcggtgg

SEQ ID NO: 15638 - DNA, 19 bp, Homo sapiens
gcaggctgtgggcggtggg

SEQ ID NO: 15639 - DNA, 19 bp, Homo sapiens
caggctgtgggcggtgggc

SEQ ID NO: 15640 - DNA, 19 bp, Homo sapiens
aggctgtgggcggtgggcc

SEQ ID NO: 15641 - DNA, 19 bp, Homo sapiens
ggctgtgggcggtgggcct

SEQ ID NO: 15642 - DNA, 19 bp, Homo sapiens
gctgtgggcggtgggcctg

SEQ ID NO: 15643 - DNA, 19 bp, Homo sapiens
ctgtgggcggtgggcctgg

SEQ ID NO: 15644 - DNA, 19 bp, Homo sapiens
tgtgggcggtgggcctggg

SEQ ID NO: 15645 - DNA, 19 bp, Homo sapiens
gtgggcggtgggcctggga

SEQ ID NO: 15646 - DNA, 19 bp, Homo sapiens
tgggcggtgggcctgggac

SEQ ID NO: 15647 - DNA, 19 bp, Homo sapiens
gggcggtgggcctgggaca

SEQ ID NO: 15648 - DNA, 19 bp, Homo sapiens
ggcggtgggcctgggacag

SEQ ID NO: 15649 - DNA, 19 bp, Homo sapiens
gcggtgggcctgggacagg

SEQ ID NO: 15650 - DNA, 19 bp, Homo sapiens
cggtgggcctgggacaggc

SEQ ID NO: 15651 - DNA, 19 bp, Homo sapiens
ggtgggcctgggacaggca

SEQ ID NO: 15652 - DNA, 19 bp, Homo sapiens
gtgggcctgggacaggcag

SEQ ID NO: 15653 - DNA, 19 bp, Homo sapiens
tgggcctgggacaggcagc

SEQ ID NO: 15654 - DNA, 19 bp, Homo sapiens
gggcctgggacaggcagct

SEQ ID NO: 15655 - DNA, 19 bp, Homo sapiens
ggcctgggacaggcagcta

SEQ ID NO: 15656 - DNA, 19 bp, Homo sapiens
gcctgggacaggcagctac

SEQ ID NO: 15657 - DNA, 19 bp, Homo sapiens
cctgggacaggcagctacg

SEQ ID NO: 15658 - DNA, 19 bp, Homo sapiens
ctgggacaggcagctacgg

SEQ ID NO: 15659 - DNA, 19 bp, Homo sapiens
tgggacaggcagctacggg

SEQ ID NO: 15660 - DNA, 19 bp, Homo sapiens
gggacaggcagctacgggc

SEQ ID NO: 15661 - DNA, 19 bp, Homo sapiens
ggacaggcagctacgggcc

SEQ ID NO: 15662 - DNA, 19 bp, Homo sapiens
gacaggcagctacgggccc

SEQ ID NO: 15663 - DNA, 19 bp, Homo sapiens
acaggcagctacgggcccg

SEQ ID NO: 15664 - DNA, 19 bp, Homo sapiens
caggcagctacgggcccga

SEQ ID NO: 15665 - DNA, 19 bp, Homo sapiens
aggcagctacgggcccgag

SEQ ID NO: 15666 - DNA, 19 bp, Homo sapiens
ggcagctacgggcccgagt

SEQ ID NO: 15667 - DNA, 19 bp, Homo sapiens
gcagctacgggcccgagtg

SEQ ID NO: 15668 - DNA, 19 bp, Homo sapiens
cagctacgggcccgagtgt

SEQ ID NO: 15669 - DNA, 19 bp, Homo sapiens
agctacgggcccgagtgtg

SEQ ID NO: 15670 - DNA, 19 bp, Homo sapiens
gctacgggcccgagtgtga

SEQ ID NO: 15671 - DNA, 19 bp, Homo sapiens
ctacgggcccgagtgtgac

SEQ ID NO: 15672 - DNA, 19 bp, Homo sapiens
tacgggcccgagtgtgact

SEQ ID NO: 15673 - DNA, 19 bp, Homo sapiens
acgggcccgagtgtgactg

SEQ ID NO: 15674 - DNA, 19 bp, Homo sapiens
cgggcccgagtgtgactgg

SEQ ID NO: 15675 - DNA, 19 bp, Homo sapiens
gggcccgagtgtgactggt

SEQ ID NO: 15676 - DNA, 19 bp, Homo sapiens
ggcccgagtgtgactggtg

SEQ ID NO: 15677 - DNA, 19 bp, Homo sapiens
gcccgagtgtgactggtgg

SEQ ID NO: 15678 - DNA, 19 bp, Homo sapiens
cccgagtgtgactggtggg

SEQ ID NO: 15679 - DNA, 19 bp, Homo sapiens
ccgagtgtgactggtgggc

SEQ ID NO: 15680 - DNA, 19 bp, Homo sapiens
cgagtgtgactggtgggcg

SEQ ID NO: 15681 - DNA, 19 bp, Homo sapiens
gagtgtgactggtgggcgc

SEQ ID NO: 15682 - DNA, 19 bp, Homo sapiens
agtgtgactggtgggcgct

SEQ ID NO: 15683 - DNA, 19 bp, Homo sapiens
gtgtgactggtgggcgctg

SEQ ID NO: 15684 - DNA, 19 bp, Homo sapiens
tgtgactggtgggcgctgg

SEQ ID NO: 15685 - DNA, 19 bp, Homo sapiens
gtgactggtgggcgctggg

SEQ ID NO: 15686 - DNA, 19 bp, Homo sapiens
tgactggtgggcgctgggt

SEQ ID NO: 15687 - DNA, 19 bp, Homo sapiens
gactggtgggcgctgggtg

SEQ ID NO: 15688 - DNA, 19 bp, Homo sapiens
actggtgggcgctgggtgt

SEQ ID NO: 15689 - DNA, 19 bp, Homo sapiens
ctggtgggcgctgggtgta

SEQ ID NO: 15690 - DNA, 19 bp, Homo sapiens
tggtgggcgctgggtgtat

SEQ ID NO: 15691 - DNA, 19 bp, Homo sapiens
ggtgggcgctgggtgtatt

SEQ ID NO: 15692 - DNA, 19 bp, Homo sapiens
gtgggcgctgggtgtattc

SEQ ID NO: 15693 - DNA, 19 bp, Homo sapiens
tgggcgctgggtgtattcg

SEQ ID NO: 15694 - DNA, 19 bp, Homo sapiens
gggcgctgggtgtattcgc

SEQ ID NO: 15695 - DNA, 19 bp, Homo sapiens
ggcgctgggtgtattcgcc

SEQ ID NO: 15696 - DNA, 19 bp, Homo sapiens
gcgctgggtgtattcgcct

SEQ ID NO: 15697 - DNA, 19 bp, Homo sapiens
cgctgggtgtattcgccta

SEQ ID NO: 15698 - DNA, 19 bp, Homo sapiens
gctgggtgtattcgcctat

SEQ ID NO: 15699 - DNA, 19 bp, Homo sapiens
ctgggtgtattcgcctatg

SEQ ID NO: 15700 - DNA, 19 bp, Homo sapiens
tgggtgtattcgcctatga

SEQ ID NO: 15701 - DNA, 19 bp, Homo sapiens
gggtgtattcgcctatgaa

SEQ ID NO: 15702 - DNA, 19 bp, Homo sapiens
ggtgtattcgcctatgaaa

SEQ ID NO: 15703 - DNA, 19 bp, Homo sapiens
gtgtattcgcctatgaaat

SEQ ID NO: 15704 - DNA, 19 bp, Homo sapiens
tgtattcgcctatgaaatg

SEQ ID NO: 15705 - DNA, 19 bp, Homo sapiens
gtattcgcctatgaaatgt

SEQ ID NO: 15706 - DNA, 19 bp, Homo sapiens
tattcgcctatgaaatgtt

SEQ ID NO: 15707 - DNA, 19 bp, Homo sapiens
attcgcctatgaaatgttc

SEQ ID NO: 15708 - DNA, 19 bp, Homo sapiens
ttcgcctatgaaatgttct

SEQ ID NO: 15709 - DNA, 19 bp, Homo sapiens
tcgcctatgaaatgttcta

SEQ ID NO: 15710 - DNA, 19 bp, Homo sapiens
cgcctatgaaatgttctat

SEQ ID NO: 15711 - DNA, 19 bp, Homo sapiens
gcctatgaaatgttctatg

SEQ ID NO: 15712 - DNA, 19 bp, Homo sapiens
cctatgaaatgttctatgg

SEQ ID NO: 15713 - DNA, 19 bp, Homo sapiens
ctatgaaatgttctatggg

SEQ ID NO: 15714 - DNA, 19 bp, Homo sapiens
tatgaaatgttctatgggc

SEQ ID NO: 15715 - DNA, 19 bp, Homo sapiens
atgaaatgttctatgggca

SEQ ID NO: 15716 - DNA, 19 bp, Homo sapiens
tgaaatgttctatgggcag

SEQ ID NO: 15717 - DNA, 19 bp, Homo sapiens
gaaatgttctatgggcaga

SEQ ID NO: 15718 - DNA, 19 bp, Homo sapiens
aaatgttctatgggcagac

SEQ ID NO: 15719 - DNA, 19 bp, Homo sapiens
aatgttctatgggcagacg

SEQ ID NO: 15720 - DNA, 19 bp, Homo sapiens
atgttctatgggcagacgc

SEQ ID NO: 15721 - DNA, 19 bp, Homo sapiens
tgttctatgggcagacgcc

SEQ ID NO: 15722 - DNA, 19 bp, Homo sapiens
gttctatgggcagacgccc

SEQ ID NO: 15723 - DNA, 19 bp, Homo sapiens
ttctatgggcagacgccct

SEQ ID NO: 15724 - DNA, 19 bp, Homo sapiens
tctatgggcagacgccctt

SEQ ID NO: 15725 - DNA, 19 bp, Homo sapiens
ctatgggcagacgcccttc

SEQ ID NO: 15726 - DNA, 19 bp, Homo sapiens
tatgggcagacgcccttct

SEQ ID NO: 15727 - DNA, 19 bp, Homo sapiens
atgggcagacgcccttcta

SEQ ID NO: 15728 - DNA, 19 bp, Homo sapiens
tgggcagacgcccttctac

SEQ ID NO: 15729 - DNA, 19 bp, Homo sapiens
gggcagacgcccttctacg

SEQ ID NO: 15730 - DNA, 19 bp, Homo sapiens
ggcagacgcccttctacgc

SEQ ID NO: 15731 - DNA, 19 bp, Homo sapiens
gcagacgcccttctacgcg

SEQ ID NO: 15732 - DNA, 19 bp, Homo sapiens
cagacgcccttctacgcgg

SEQ ID NO: 15733 - DNA, 19 bp, Homo sapiens
agacgcccttctacgcgga

SEQ ID NO: 15734 - DNA, 19 bp, Homo sapiens
gacgcccttctacgcggat

SEQ ID NO: 15735 - DNA, 19 bp, Homo sapiens
acgcccttctacgcggatt

SEQ ID NO: 15736 - DNA, 19 bp, Homo sapiens
cgcccttctacgcggattc

SEQ ID NO: 15737 - DNA, 19 bp, Homo sapiens
gcccttctacgcggattcc

SEQ ID NO: 15738 - DNA, 19 bp, Homo sapiens
cccttctacgcggattcca

SEQ ID NO: 15739 - DNA, 19 bp, Homo sapiens
ccttctacgcggattccac

SEQ ID NO: 15740 - DNA, 19 bp, Homo sapiens
cttctacgcggattccacg

SEQ ID NO: 15741 - DNA, 19 bp, Homo sapiens
ttctacgcggattccacgg

SEQ ID NO: 15742 - DNA, 19 bp, Homo sapiens
tctacgcggattccacggc

SEQ ID NO: 15743 - DNA, 19 bp, Homo sapiens
ctacgcggattccacggcg

SEQ ID NO: 15744 - DNA, 19 bp, Homo sapiens
tacgcggattccacggcgg

SEQ ID NO: 15745 - DNA, 19 bp, Homo sapiens
acgcggattccacggcgga

SEQ ID NO: 15746 - DNA, 19 bp, Homo sapiens
cgcggattccacggcggag

SEQ ID NO: 15747 - DNA, 19 bp, Homo sapiens
gcggattccacggcggaga

SEQ ID NO: 15748 - DNA, 19 bp, Homo sapiens
cggattccacggcggagac

SEQ ID NO: 15749 - DNA, 19 bp, Homo sapiens
ggattccacggcggagacc

SEQ ID NO: 15750 - DNA, 19 bp, Homo sapiens
gattccacggcggagacct

SEQ ID NO: 15751 - DNA, 19 bp, Homo sapiens
attccacggcggagaccta

SEQ ID NO: 15752 - DNA, 19 bp, Homo sapiens
ttccacggcggagacctat

SEQ ID NO: 15753 - DNA, 19 bp, Homo sapiens
tccacggcggagacctatg

SEQ ID NO: 15754 - DNA, 19 bp, Homo sapiens
ccacggcggagacctatgg

SEQ ID NO: 15755 - DNA, 19 bp, Homo sapiens
cacggcggagacctatggc

SEQ ID NO: 15756 - DNA, 19 bp, Homo sapiens
acggcggagacctatggca

SEQ ID NO: 15757 - DNA, 19 bp, Homo sapiens
cggcggagacctatggcaa

SEQ ID NO: 15758 - DNA, 19 bp, Homo sapiens
ggcggagacctatggcaag

SEQ ID NO: 15759 - DNA, 19 bp, Homo sapiens
gcggagacctatggcaaga

SEQ ID NO: 15760 - DNA, 19 bp, Homo sapiens
cggagacctatggcaagat

SEQ ID NO: 15761 - DNA, 19 bp, Homo sapiens
ggagacctatggcaagatc

SEQ ID NO: 15762 - DNA, 19 bp, Homo sapiens
gagacctatggcaagatcg

SEQ ID NO: 15763 - DNA, 19 bp, Homo sapiens
agacctatggcaagatcgt

SEQ ID NO: 15764 - DNA, 19 bp, Homo sapiens
gacctatggcaagatcgtc

SEQ ID NO: 15765 - DNA, 19 bp, Homo sapiens
acctatggcaagatcgtcc

SEQ ID NO: 15766 - DNA, 19 bp, Homo sapiens
cctatggcaagatcgtcca

SEQ ID NO: 15767 - DNA, 19 bp, Homo sapiens
ctatggcaagatcgtccac

SEQ ID NO: 15768 - DNA, 19 bp, Homo sapiens
tatggcaagatcgtccact

SEQ ID NO: 15769 - DNA, 19 bp, Homo sapiens
atggcaagatcgtccacta

SEQ ID NO: 15770 - DNA, 19 bp, Homo sapiens
tggcaagatcgtccactac

SEQ ID NO: 15771 - DNA, 19 bp, Homo sapiens
ggcaagatcgtccactaca

SEQ ID NO: 15772 - DNA, 19 bp, Homo sapiens
gcaagatcgtccactacaa

SEQ ID NO: 15773 - DNA, 19 bp, Homo sapiens
caagatcgtccactacaag

SEQ ID NO: 15774 - DNA, 19 bp, Homo sapiens
aagatcgtccactacaagg

SEQ ID NO: 15775 - DNA, 19 bp, Homo sapiens
agatcgtccactacaagga

SEQ ID NO: 15776 - DNA, 19 bp, Homo sapiens
gatcgtccactacaaggag

SEQ ID NO: 15777 - DNA, 19 bp, Homo sapiens
atcgtccactacaaggagc

SEQ ID NO: 15778 - DNA, 19 bp, Homo sapiens
tcgtccactacaaggagca

SEQ ID NO: 15779 - DNA, 19 bp, Homo sapiens
cgtccactacaaggagcac

SEQ ID NO: 15780 - DNA, 19 bp, Homo sapiens
gtccactacaaggagcacc

SEQ ID NO: 15781 - DNA, 19 bp, Homo sapiens
tccactacaaggagcacct

SEQ ID NO: 15782 - DNA, 19 bp, Homo sapiens
ccactacaaggagcacctc

SEQ ID NO: 15783 - DNA, 19 bp, Homo sapiens
cactacaaggagcacctct

SEQ ID NO: 15784 - DNA, 19 bp, Homo sapiens
actacaaggagcacctctc

SEQ ID NO: 15785 - DNA, 19 bp, Homo sapiens
ctacaaggagcacctctct

SEQ ID NO: 15786 - DNA, 19 bp, Homo sapiens
tacaaggagcacctctctc

SEQ ID NO: 15787 - DNA, 19 bp, Homo sapiens
acaaggagcacctctctct

SEQ ID NO: 15788 - DNA, 19 bp, Homo sapiens
caaggagcacctctctctg

SEQ ID NO: 15789 - DNA, 19 bp, Homo sapiens
aaggagcacctctctctgc

SEQ ID NO: 15790 - DNA, 19 bp, Homo sapiens
aggagcacctctctctgcc

SEQ ID NO: 15791 - DNA, 19 bp, Homo sapiens
ggagcacctctctctgccg

SEQ ID NO: 15792 - DNA, 19 bp, Homo sapiens
gagcacctctctctgccgc

SEQ ID NO: 15793 - DNA, 19 bp, Homo sapiens
agcacctctctctgccgct

SEQ ID NO: 15794 - DNA, 19 bp, Homo sapiens
gcacctctctctgccgctg

SEQ ID NO: 15795 - DNA, 19 bp, Homo sapiens
cacctctctctgccgctgg

SEQ ID NO: 15796 - DNA, 19 bp, Homo sapiens
acctctctctgccgctggt

SEQ ID NO: 15797 - DNA, 19 bp, Homo sapiens
cctctctctgccgctggtg

SEQ ID NO: 15798 - DNA, 19 bp, Homo sapiens
ctctctctgccgctggtgg

SEQ ID NO: 15799 - DNA, 19 bp, Homo sapiens
tctctctgccgctggtgga

SEQ ID NO: 15800 - DNA, 19 bp, Homo sapiens
ctctctgccgctggtggac

SEQ ID NO: 15801 - DNA, 19 bp, Homo sapiens
tctctgccgctggtggacg

SEQ ID NO: 15802 - DNA, 19 bp, Homo sapiens
ctctgccgctggtggacga

SEQ ID NO: 15803 - DNA, 19 bp, Homo sapiens
tctgccgctggtggacgaa

SEQ ID NO: 15804 - DNA, 19 bp, Homo sapiens
ctgccgctggtggacgaag

SEQ ID NO: 15805 - DNA, 19 bp, Homo sapiens
tgccgctggtggacgaagg

SEQ ID NO: 15806 - DNA, 19 bp, Homo sapiens
gccgctggtggacgaaggg

SEQ ID NO: 15807 - DNA, 19 bp, Homo sapiens
ccgctggtggacgaagggg

SEQ ID NO: 15808 - DNA, 19 bp, Homo sapiens
cgctggtggacgaaggggt

SEQ ID NO: 15809 - DNA, 19 bp, Homo sapiens
gctggtggacgaaggggtc

SEQ ID NO: 15810 - DNA, 19 bp, Homo sapiens
ctggtggacgaaggggtcc

SEQ ID NO: 15811 - DNA, 19 bp, Homo sapiens
tggtggacgaaggggtccc

SEQ ID NO: 15812 - DNA, 19 bp, Homo sapiens
ggtggacgaaggggtccct

SEQ ID NO: 15813 - DNA, 19 bp, Homo sapiens
gtggacgaaggggtccctg

SEQ ID NO: 15814 - DNA, 19 bp, Homo sapiens
tggacgaaggggtccctga

SEQ ID NO: 15815 - DNA, 19 bp, Homo sapiens
ggacgaaggggtccctgag

SEQ ID NO: 15816 - DNA, 19 bp, Homo sapiens
gacgaaggggtccctgagg

SEQ ID NO: 15817 - DNA, 19 bp, Homo sapiens
acgaaggggtccctgagga

SEQ ID NO: 15818 - DNA, 19 bp, Homo sapiens
cgaaggggtccctgaggag

SEQ ID NO: 15819 - DNA, 19 bp, Homo sapiens
gaaggggtccctgaggagg

SEQ ID NO: 15820 - DNA, 19 bp, Homo sapiens
aaggggtccctgaggaggc

SEQ ID NO: 15821 - DNA, 19 bp, Homo sapiens
aggggtccctgaggaggct

SEQ ID NO: 15822 - DNA, 19 bp, Homo sapiens
ggggtccctgaggaggctc

SEQ ID NO: 15823 - DNA, 19 bp, Homo sapiens
gggtccctgaggaggctcg

SEQ ID NO: 15824 - DNA, 19 bp, Homo sapiens
ggtccctgaggaggctcga

SEQ ID NO: 15825 - DNA, 19 bp, Homo sapiens
gtccctgaggaggctcgag

SEQ ID NO: 15826 - DNA, 19 bp, Homo sapiens
tccctgaggaggctcgaga

SEQ ID NO: 15827 - DNA, 19 bp, Homo sapiens
ccctgaggaggctcgagac

SEQ ID NO: 15828 - DNA, 19 bp, Homo sapiens
cctgaggaggctcgagact

SEQ ID NO: 15829 - DNA, 19 bp, Homo sapiens
ctgaggaggctcgagactt

SEQ ID NO: 15830 - DNA, 19 bp, Homo sapiens
tgaggaggctcgagacttc

SEQ ID NO: 15831 - DNA, 19 bp, Homo sapiens
gaggaggctcgagacttca

SEQ ID NO: 15832 - DNA, 19 bp, Homo sapiens
aggaggctcgagacttcat

SEQ ID NO: 15833 - DNA, 19 bp, Homo sapiens
ggaggctcgagacttcatt

SEQ ID NO: 15834 - DNA, 19 bp, Homo sapiens
gaggctcgagacttcattc

SEQ ID NO: 15835 - DNA, 19 bp, Homo sapiens
aggctcgagacttcattca

SEQ ID NO: 15836 - DNA, 19 bp, Homo sapiens
ggctcgagacttcattcag

SEQ ID NO: 15837 - DNA, 19 bp, Homo sapiens
gctcgagacttcattcagc

SEQ ID NO: 15838 - DNA, 19 bp, Homo sapiens
ctcgagacttcattcagcg

SEQ ID NO: 15839 - DNA, 19 bp, Homo sapiens
tcgagacttcattcagcgg

SEQ ID NO: 15840 - DNA, 19 bp, Homo sapiens
cgagacttcattcagcggt

SEQ ID NO: 15841 - DNA, 19 bp, Homo sapiens
gagacttcattcagcggtt

SEQ ID NO: 15842 - DNA, 19 bp, Homo sapiens
agacttcattcagcggttg

SEQ ID NO: 15843 - DNA, 19 bp, Homo sapiens
gacttcattcagcggttgc

SEQ ID NO: 15844 - DNA, 19 bp, Homo sapiens
acttcattcagcggttgct

SEQ ID NO: 15845 - DNA, 19 bp, Homo sapiens
cttcattcagcggttgctg

SEQ ID NO: 15846 - DNA, 19 bp, Homo sapiens
ttcattcagcggttgctgt

SEQ ID NO: 15847 - DNA, 19 bp, Homo sapiens
tcattcagcggttgctgtg

SEQ ID NO: 15848 - DNA, 19 bp, Homo sapiens
cattcagcggttgctgtgt

SEQ ID NO: 15849 - DNA, 19 bp, Homo sapiens
attcagcggttgctgtgtc

SEQ ID NO: 15850 - DNA, 19 bp, Homo sapiens
ttcagcggttgctgtgtcc

SEQ ID NO: 15851 - DNA, 19 bp, Homo sapiens
tcagcggttgctgtgtccc

SEQ ID NO: 15852 - DNA, 19 bp, Homo sapiens
cagcggttgctgtgtcccc

SEQ ID NO: 15853 - DNA, 19 bp, Homo sapiens
agcggttgctgtgtccccc

SEQ ID NO: 15854 - DNA, 19 bp, Homo sapiens
gcggttgctgtgtcccccg

SEQ ID NO: 15855 - DNA, 19 bp, Homo sapiens
cggttgctgtgtcccccgg

SEQ ID NO: 15856 - DNA, 19 bp, Homo sapiens
ggttgctgtgtcccccgga

SEQ ID NO: 15857 - DNA, 19 bp, Homo sapiens
gttgctgtgtcccccggag

SEQ ID NO: 15858 - DNA, 19 bp, Homo sapiens
ttgctgtgtcccccggaga

SEQ ID NO: 15859 - DNA, 19 bp, Homo sapiens
tgctgtgtcccccggagac

SEQ ID NO: 15860 - DNA, 19 bp, Homo sapiens
gctgtgtcccccggagaca

SEQ ID NO: 15861 - DNA, 19 bp, Homo sapiens
ctgtgtcccccggagacac

SEQ ID NO: 15862 - DNA, 19 bp, Homo sapiens
tgtgtcccccggagacacg

SEQ ID NO: 15863 - DNA, 19 bp, Homo sapiens
gtgtcccccggagacacgg

SEQ ID NO: 15864 - DNA, 19 bp, Homo sapiens
tgtcccccggagacacggc

SEQ ID NO: 15865 - DNA, 19 bp, Homo sapiens
gtcccccggagacacggct

SEQ ID NO: 15866 - DNA, 19 bp, Homo sapiens
tcccccggagacacggctg

SEQ ID NO: 15867 - DNA, 19 bp, Homo sapiens
cccccggagacacggctgg

SEQ ID NO: 15868 - DNA, 19 bp, Homo sapiens
ccccggagacacggctggg

SEQ ID NO: 15869 - DNA, 19 bp, Homo sapiens
cccggagacacggctgggc

SEQ ID NO: 15870 - DNA, 19 bp, Homo sapiens
ccggagacacggctgggcc

SEQ ID NO: 15871 - DNA, 19 bp, Homo sapiens
cggagacacggctgggccg

SEQ ID NO: 15872 - DNA, 19 bp, Homo sapiens
ggagacacggctgggccgg

SEQ ID NO: 15873 - DNA, 19 bp, Homo sapiens
gagacacggctgggccggg

SEQ ID NO: 15874 - DNA, 19 bp, Homo sapiens
agacacggctgggccgggg

SEQ ID NO: 15875 - DNA, 19 bp, Homo sapiens
gacacggctgggccggggt

SEQ ID NO: 15876 - DNA, 19 bp, Homo sapiens
acacggctgggccggggtg

SEQ ID NO: 15877 - DNA, 19 bp, Homo sapiens
cacggctgggccggggtgg

SEQ ID NO: 15878 - DNA, 19 bp, Homo sapiens
acggctgggccggggtgga

SEQ ID NO: 15879 - DNA, 19 bp, Homo sapiens
cggctgggccggggtggag

SEQ ID NO: 15880 - DNA, 19 bp, Homo sapiens
ggctgggccggggtggagc

SEQ ID NO: 15881 - DNA, 19 bp, Homo sapiens
gctgggccggggtggagca

SEQ ID NO: 15882 - DNA, 19 bp, Homo sapiens
ctgggccggggtggagcag

SEQ ID NO: 15883 - DNA, 19 bp, Homo sapiens
tgggccggggtggagcagg

SEQ ID NO: 15884 - DNA, 19 bp, Homo sapiens
gggccggggtggagcaggc

SEQ ID NO: 15885 - DNA, 19 bp, Homo sapiens
ggccggggtggagcaggcg

SEQ ID NO: 15886 - DNA, 19 bp, Homo sapiens
gccggggtggagcaggcga

SEQ ID NO: 15887 - DNA, 19 bp, Homo sapiens
ccggggtggagcaggcgac

SEQ ID NO: 15888 - DNA, 19 bp, Homo sapiens
cggggtggagcaggcgact

SEQ ID NO: 15889 - DNA, 19 bp, Homo sapiens
ggggtggagcaggcgactt

SEQ ID NO: 15890 - DNA, 19 bp, Homo sapiens
gggtggagcaggcgacttc

SEQ ID NO: 15891 - DNA, 19 bp, Homo sapiens
ggtggagcaggcgacttcc

SEQ ID NO: 15892 - DNA, 19 bp, Homo sapiens
gtggagcaggcgacttccg

SEQ ID NO: 15893 - DNA, 19 bp, Homo sapiens
tggagcaggcgacttccgg

SEQ ID NO: 15894 - DNA, 19 bp, Homo sapiens
ggagcaggcgacttccgga

SEQ ID NO: 15895 - DNA, 19 bp, Homo sapiens
gagcaggcgacttccggac

SEQ ID NO: 15896 - DNA, 19 bp, Homo sapiens
agcaggcgacttccggaca

SEQ ID NO: 15897 - DNA, 19 bp, Homo sapiens
gcaggcgacttccggacac

SEQ ID NO: 15898 - DNA, 19 bp, Homo sapiens
caggcgacttccggacaca

SEQ ID NO: 15899 - DNA, 19 bp, Homo sapiens
aggcgacttccggacacat

SEQ ID NO: 15900 - DNA, 19 bp, Homo sapiens
ggcgacttccggacacatc

SEQ ID NO: 15901 - DNA, 19 bp, Homo sapiens
gcgacttccggacacatcc

SEQ ID NO: 15902 - DNA, 19 bp, Homo sapiens
cgacttccggacacatccc

SEQ ID NO: 15903 - DNA, 19 bp, Homo sapiens
gacttccggacacatccct

SEQ ID NO: 15904 - DNA, 19 bp, Homo sapiens
acttccggacacatccctt

SEQ ID NO: 15905 - DNA, 19 bp, Homo sapiens
cttccggacacatcccttc

SEQ ID NO: 15906 - DNA, 19 bp, Homo sapiens
ttccggacacatcccttct

SEQ ID NO: 15907 - DNA, 19 bp, Homo sapiens
tccggacacatcccttctt

SEQ ID NO: 15908 - DNA, 19 bp, Homo sapiens
ccggacacatcccttcttc

SEQ ID NO: 15909 - DNA, 19 bp, Homo sapiens
cggacacatcccttcttct

SEQ ID NO: 15910 - DNA, 19 bp, Homo sapiens
ggacacatcccttcttctt

SEQ ID NO: 15911 - DNA, 19 bp, Homo sapiens
gacacatcccttcttcttt

SEQ ID NO: 15912 - DNA, 19 bp, Homo sapiens
acacatcccttcttctttg

SEQ ID NO: 15913 - DNA, 19 bp, Homo sapiens
cacatcccttcttctttgg

SEQ ID NO: 15914 - DNA, 19 bp, Homo sapiens
acatcccttcttctttggc

SEQ ID NO: 15915 - DNA, 19 bp, Homo sapiens
catcccttcttctttggcc

SEQ ID NO: 15916 - DNA, 19 bp, Homo sapiens
atcccttcttctttggcct

SEQ ID NO: 15917 - DNA, 19 bp, Homo sapiens
tcccttcttctttggcctc

SEQ ID NO: 15918 - DNA, 19 bp, Homo sapiens
cccttcttctttggcctcg

SEQ ID NO: 15919 - DNA, 19 bp, Homo sapiens
ccttcttctttggcctcga

SEQ ID NO: 15920 - DNA, 19 bp, Homo sapiens
cttcttctttggcctcgac

SEQ ID NO: 15921 - DNA, 19 bp, Homo sapiens
ttcttctttggcctcgact

SEQ ID NO: 15922 - DNA, 19 bp, Homo sapiens
tcttctttggcctcgactg

SEQ ID NO: 15923 - DNA, 19 bp, Homo sapiens
cttctttggcctcgactgg

SEQ ID NO: 15924 - DNA, 19 bp, Homo sapiens
ttctttggcctcgactggg

SEQ ID NO: 15925 - DNA, 19 bp, Homo sapiens
tctttggcctcgactggga

SEQ ID NO: 15926 - DNA, 19 bp, Homo sapiens
ctttggcctcgactgggat

SEQ ID NO: 15927 - DNA, 19 bp, Homo sapiens
tttggcctcgactgggatg

SEQ ID NO: 15928 - DNA, 19 bp, Homo sapiens
ttggcctcgactgggatgg

SEQ ID NO: 15929 - DNA, 19 bp, Homo sapiens
tggcctcgactgggatggt

SEQ ID NO: 15930 - DNA, 19 bp, Homo sapiens
ggcctcgactgggatggtc

SEQ ID NO: 15931 - DNA, 19 bp, Homo sapiens
gcctcgactgggatggtct

SEQ ID NO: 15932 - DNA, 19 bp, Homo sapiens
cctcgactgggatggtctc

SEQ ID NO: 15933 - DNA, 19 bp, Homo sapiens
ctcgactgggatggtctcc

SEQ ID NO: 15934 - DNA, 19 bp, Homo sapiens
tcgactgggatggtctccg

SEQ ID NO: 15935 - DNA, 19 bp, Homo sapiens
cgactgggatggtctccgg

SEQ ID NO: 15936 - DNA, 19 bp, Homo sapiens
gactgggatggtctccggg

SEQ ID NO: 15937 - DNA, 19 bp, Homo sapiens
actgggatggtctccggga

SEQ ID NO: 15938 - DNA, 19 bp, Homo sapiens
ctgggatggtctccgggac

SEQ ID NO: 15939 - DNA, 19 bp, Homo sapiens
tgggatggtctccgggaca

SEQ ID NO: 15940 - DNA, 19 bp, Homo sapiens
gggatggtctccgggacag

SEQ ID NO: 15941 - DNA, 19 bp, Homo sapiens
ggatggtctccgggacagc

SEQ ID NO: 15942 - DNA, 19 bp, Homo sapiens
gatggtctccgggacagcg

SEQ ID NO: 15943 - DNA, 19 bp, Homo sapiens
atggtctccgggacagcgt

SEQ ID NO: 15944 - DNA, 19 bp, Homo sapiens
tggtctccgggacagcgtg

SEQ ID NO: 15945 - DNA, 19 bp, Homo sapiens
ggtctccgggacagcgtgc

SEQ ID NO: 15946 - DNA, 19 bp, Homo sapiens
gtctccgggacagcgtgcc

SEQ ID NO: 15947 - DNA, 19 bp, Homo sapiens
tctccgggacagcgtgccc

SEQ ID NO: 15948 - DNA, 19 bp, Homo sapiens
ctccgggacagcgtgcccc

SEQ ID NO: 15949 - DNA, 19 bp, Homo sapiens
tccgggacagcgtgccccc

SEQ ID NO: 15950 - DNA, 19 bp, Homo sapiens
ccgggacagcgtgcccccc

SEQ ID NO: 15951 - DNA, 19 bp, Homo sapiens
cgggacagcgtgcccccct

SEQ ID NO: 15952 - DNA, 19 bp, Homo sapiens
gggacagcgtgcccccctt

SEQ ID NO: 15953 - DNA, 19 bp, Homo sapiens
ggacagcgtgccccccttt

SEQ ID NO: 15954 - DNA, 19 bp, Homo sapiens
gacagcgtgccccccttta

SEQ ID NO: 15955 - DNA, 19 bp, Homo sapiens
acagcgtgcccccctttac

SEQ ID NO: 15956 - DNA, 19 bp, Homo sapiens
cagcgtgcccccctttaca

SEQ ID NO: 15957 - DNA, 19 bp, Homo sapiens
agcgtgcccccctttacac

SEQ ID NO: 15958 - DNA, 19 bp, Homo sapiens
gcgtgcccccctttacacc

SEQ ID NO: 15959 - DNA, 19 bp, Homo sapiens
cgtgcccccctttacaccg

SEQ ID NO: 15960 - DNA, 19 bp, Homo sapiens
gtgcccccctttacaccgg

SEQ ID NO: 15961 - DNA, 19 bp, Homo sapiens
tgcccccctttacaccgga

SEQ ID NO: 15962 - DNA, 19 bp, Homo sapiens
gcccccctttacaccggat

SEQ ID NO: 15963 - DNA, 19 bp, Homo sapiens
cccccctttacaccggatt

SEQ ID NO: 15964 - DNA, 19 bp, Homo sapiens
ccccctttacaccggattt

SEQ ID NO: 15965 - DNA, 19 bp, Homo sapiens
cccctttacaccggatttc

SEQ ID NO: 15966 - DNA, 19 bp, Homo sapiens
ccctttacaccggatttcg

SEQ ID NO: 15967 - DNA, 19 bp, Homo sapiens
cctttacaccggatttcga

SEQ ID NO: 15968 - DNA, 19 bp, Homo sapiens
ctttacaccggatttcgaa

SEQ ID NO: 15969 - DNA, 19 bp, Homo sapiens
tttacaccggatttcgaag

SEQ ID NO: 15970 - DNA, 19 bp, Homo sapiens
ttacaccggatttcgaagg

SEQ ID NO: 15971 - DNA, 19 bp, Homo sapiens
tacaccggatttcgaaggt

SEQ ID NO: 15972 - DNA, 19 bp, Homo sapiens
acaccggatttcgaaggtg

SEQ ID NO: 15973 - DNA, 19 bp, Homo sapiens
caccggatttcgaaggtgc

SEQ ID NO: 15974 - DNA, 19 bp, Homo sapiens
accggatttcgaaggtgcc

SEQ ID NO: 15975 - DNA, 19 bp, Homo sapiens
ccggatttcgaaggtgcca

SEQ ID NO: 15976 - DNA, 19 bp, Homo sapiens
cggatttcgaaggtgccac

SEQ ID NO: 15977 - DNA, 19 bp, Homo sapiens
ggatttcgaaggtgccacc

SEQ ID NO: 15978 - DNA, 19 bp, Homo sapiens
gatttcgaaggtgccaccg

SEQ ID NO: 15979 - DNA, 19 bp, Homo sapiens
atttcgaaggtgccaccga

SEQ ID NO: 15980 - DNA, 19 bp, Homo sapiens
tttcgaaggtgccaccgac

SEQ ID NO: 15981 - DNA, 19 bp, Homo sapiens
ttcgaaggtgccaccgaca

SEQ ID NO: 15982 - DNA, 19 bp, Homo sapiens
tcgaaggtgccaccgacac

SEQ ID NO: 15983 - DNA, 19 bp, Homo sapiens
cgaaggtgccaccgacaca

SEQ ID NO: 15984 - DNA, 19 bp, Homo sapiens
gaaggtgccaccgacacat

SEQ ID NO: 15985 - DNA, 19 bp, Homo sapiens
aaggtgccaccgacacatg

SEQ ID NO: 15986 - DNA, 19 bp, Homo sapiens
aggtgccaccgacacatgc

SEQ ID NO: 15987 - DNA, 19 bp, Homo sapiens
ggtgccaccgacacatgca

SEQ ID NO: 15988 - DNA, 19 bp, Homo sapiens
gtgccaccgacacatgcaa

SEQ ID NO: 15989 - DNA, 19 bp, Homo sapiens
tgccaccgacacatgcaac

SEQ ID NO: 15990 - DNA, 19 bp, Homo sapiens
gccaccgacacatgcaact

SEQ ID NO: 15991 - DNA, 19 bp, Homo sapiens
ccaccgacacatgcaactt

SEQ ID NO: 15992 - DNA, 19 bp, Homo sapiens
caccgacacatgcaacttc

SEQ ID NO: 15993 - DNA, 19 bp, Homo sapiens
accgacacatgcaacttcg

SEQ ID NO: 15994 - DNA, 19 bp, Homo sapiens
ccgacacatgcaacttcga

SEQ ID NO: 15995 - DNA, 19 bp, Homo sapiens
cgacacatgcaacttcgac

SEQ ID NO: 15996 - DNA, 19 bp, Homo sapiens
gacacatgcaacttcgact

SEQ ID NO: 15997 - DNA, 19 bp, Homo sapiens
acacatgcaacttcgactt

SEQ ID NO: 15998 - DNA, 19 bp, Homo sapiens
cacatgcaacttcgacttg

SEQ ID NO: 15999 - DNA, 19 bp, Homo sapiens
acatgcaacttcgacttgg

SEQ ID NO: 16000 - DNA, 19 bp, Homo sapiens
catgcaacttcgacttggt

SEQ ID NO: 16001 - DNA, 19 bp, Homo sapiens
atgcaacttcgacttggtg

SEQ ID NO: 16002 - DNA, 19 bp, Homo sapiens
tgcaacttcgacttggtgg

SEQ ID NO: 16003 - DNA, 19 bp, Homo sapiens
gcaacttcgacttggtgga

SEQ ID NO: 16004 - DNA, 19 bp, Homo sapiens
caacttcgacttggtggag

SEQ ID NO: 16005 - DNA, 19 bp, Homo sapiens
aacttcgacttggtggagg

SEQ ID NO: 16006 - DNA, 19 bp, Homo sapiens
acttcgacttggtggagga

SEQ ID NO: 16007 - DNA, 19 bp, Homo sapiens
cttcgacttggtggaggac

SEQ ID NO: 16008 - DNA, 19 bp, Homo sapiens
ttcgacttggtggaggacg

SEQ ID NO: 16009 - DNA, 19 bp, Homo sapiens
tcgacttggtggaggacgg

SEQ ID NO: 16010 - DNA, 19 bp, Homo sapiens
cgacttggtggaggacggg

SEQ ID NO: 16011 - DNA, 19 bp, Homo sapiens
gacttggtggaggacgggc

SEQ ID NO: 16012 - DNA, 19 bp, Homo sapiens
acttggtggaggacgggct

SEQ ID NO: 16013 - DNA, 19 bp, Homo sapiens
cttggtggaggacgggctc

SEQ ID NO: 16014 - DNA, 19 bp, Homo sapiens
ttggtggaggacgggctca

SEQ ID NO: 16015 - DNA, 19 bp, Homo sapiens
tggtggaggacgggctcac

SEQ ID NO: 16016 - DNA, 19 bp, Homo sapiens
ggtggaggacgggctcact

SEQ ID NO: 16017 - DNA, 19 bp, Homo sapiens
gtggaggacgggctcactg

SEQ ID NO: 16018 - DNA, 19 bp, Homo sapiens
tggaggacgggctcactgc

SEQ ID NO: 16019 - DNA, 19 bp, Homo sapiens
ggaggacgggctcactgcc

SEQ ID NO: 16020 - DNA, 19 bp, Homo sapiens
gaggacgggctcactgcca

SEQ ID NO: 16021 - DNA, 19 bp, Homo sapiens
aggacgggctcactgccat

SEQ ID NO: 16022 - DNA, 19 bp, Homo sapiens
ggacgggctcactgccatg

SEQ ID NO: 16023 - DNA, 19 bp, Homo sapiens
gacgggctcactgccatgg

SEQ ID NO: 16024 - DNA, 19 bp, Homo sapiens
acgggctcactgccatgga

SEQ ID NO: 16025 - DNA, 19 bp, Homo sapiens
cgggctcactgccatggag

SEQ ID NO: 16026 - DNA, 19 bp, Homo sapiens
gggctcactgccatggaga

SEQ ID NO: 16027 - DNA, 19 bp, Homo sapiens
ggctcactgccatggagac

SEQ ID NO: 16028 - DNA, 19 bp, Homo sapiens
gctcactgccatggagaca

SEQ ID NO: 16029 - DNA, 19 bp, Homo sapiens
ctcactgccatggagacac

SEQ ID NO: 16030 - DNA, 19 bp, Homo sapiens
tcactgccatggagacact

SEQ ID NO: 16031 - DNA, 19 bp, Homo sapiens
cactgccatggagacactg

SEQ ID NO: 16032 - DNA, 19 bp, Homo sapiens
actgccatggagacactgt

SEQ ID NO: 16033 - DNA, 19 bp, Homo sapiens
ctgccatggagacactgtc

SEQ ID NO: 16034 - DNA, 19 bp, Homo sapiens
tgccatggagacactgtcg

SEQ ID NO: 16035 - DNA, 19 bp, Homo sapiens
gccatggagacactgtcgg

SEQ ID NO: 16036 - DNA, 19 bp, Homo sapiens
ccatggagacactgtcgga

SEQ ID NO: 16037 - DNA, 19 bp, Homo sapiens
catggagacactgtcggac

SEQ ID NO: 16038 - DNA, 19 bp, Homo sapiens
atggagacactgtcggaca

SEQ ID NO: 16039 - DNA, 19 bp, Homo sapiens
tggagacactgtcggacat

SEQ ID NO: 16040 - DNA, 19 bp, Homo sapiens
ggagacactgtcggacatt

SEQ ID NO: 16041 - DNA, 19 bp, Homo sapiens
gagacactgtcggacattc

SEQ ID NO: 16042 - DNA, 19 bp, Homo sapiens
agacactgtcggacattcg

SEQ ID NO: 16043 - DNA, 19 bp, Homo sapiens
gacactgtcggacattcgg

SEQ ID NO: 16044 - DNA, 19 bp, Homo sapiens
acactgtcggacattcggg

SEQ ID NO: 16045 - DNA, 19 bp, Homo sapiens
cactgtcggacattcggga

SEQ ID NO: 16046 - DNA, 19 bp, Homo sapiens
actgtcggacattcgggaa

SEQ ID NO: 16047 - DNA, 19 bp, Homo sapiens
ctgtcggacattcgggaag

SEQ ID NO: 16048 - DNA, 19 bp, Homo sapiens
tgtcggacattcgggaagg

SEQ ID NO: 16049 - DNA, 19 bp, Homo sapiens
gtcggacattcgggaaggt

SEQ ID NO: 16050 - DNA, 19 bp, Homo sapiens
tcggacattcgggaaggtg

SEQ ID NO: 16051 - DNA, 19 bp, Homo sapiens
cggacattcgggaaggtgc

SEQ ID NO: 16052 - DNA, 19 bp, Homo sapiens
ggacattcgggaaggtgcg

SEQ ID NO: 16053 - DNA, 19 bp, Homo sapiens
gacattcgggaaggtgcgc

SEQ ID NO: 16054 - DNA, 19 bp, Homo sapiens
acattcgggaaggtgcgcc

SEQ ID NO: 16055 - DNA, 19 bp, Homo sapiens
cattcgggaaggtgcgccg

SEQ ID NO: 16056 - DNA, 19 bp, Homo sapiens
attcgggaaggtgcgccgc

SEQ ID NO: 16057 - DNA, 19 bp, Homo sapiens
ttcgggaaggtgcgccgct

SEQ ID NO: 16058 - DNA, 19 bp, Homo sapiens
tcgggaaggtgcgccgcta

SEQ ID NO: 16059 - DNA, 19 bp, Homo sapiens
cgggaaggtgcgccgctag

SEQ ID NO: 16060 - DNA, 19 bp, Homo sapiens
gggaaggtgcgccgctagg

SEQ ID NO: 16061 - DNA, 19 bp, Homo sapiens
ggaaggtgcgccgctaggg

SEQ ID NO: 16062 - DNA, 19 bp, Homo sapiens
gaaggtgcgccgctagggg

SEQ ID NO: 16063 - DNA, 19 bp, Homo sapiens
aaggtgcgccgctaggggt

SEQ ID NO: 16064 - DNA, 19 bp, Homo sapiens
aggtgcgccgctaggggtc

SEQ ID NO: 16065 - DNA, 19 bp, Homo sapiens
ggtgcgccgctaggggtcc

SEQ ID NO: 16066 - DNA, 19 bp, Homo sapiens
gtgcgccgctaggggtcca

SEQ ID NO: 16067 - DNA, 19 bp, Homo sapiens
tgcgccgctaggggtccac

SEQ ID NO: 16068 - DNA, 19 bp, Homo sapiens
gcgccgctaggggtccacc

SEQ ID NO: 16069 - DNA, 19 bp, Homo sapiens
cgccgctaggggtccacct

SEQ ID NO: 16070 - DNA, 19 bp, Homo sapiens
gccgctaggggtccacctg

SEQ ID NO: 16071 - DNA, 19 bp, Homo sapiens
ccgctaggggtccacctgc

SEQ ID NO: 16072 - DNA, 19 bp, Homo sapiens
cgctaggggtccacctgcc

SEQ ID NO: 16073 - DNA, 19 bp, Homo sapiens
gctaggggtccacctgcct

SEQ ID NO: 16074 - DNA, 19 bp, Homo sapiens
ctaggggtccacctgcctt

SEQ ID NO: 16075 - DNA, 19 bp, Homo sapiens
taggggtccacctgccttt

SEQ ID NO: 16076 - DNA, 19 bp, Homo sapiens
aggggtccacctgcctttt

SEQ ID NO: 16077 - DNA, 19 bp, Homo sapiens
ggggtccacctgccttttg

SEQ ID NO: 16078 - DNA, 19 bp, Homo sapiens
gggtccacctgccttttgt

SEQ ID NO: 16079 - DNA, 19 bp, Homo sapiens
ggtccacctgccttttgtg

SEQ ID NO: 16080 - DNA, 19 bp, Homo sapiens
gtccacctgccttttgtgg

SEQ ID NO: 16081 - DNA, 19 bp, Homo sapiens
tccacctgccttttgtggg

SEQ ID NO: 16082 - DNA, 19 bp, Homo sapiens
ccacctgccttttgtgggc

SEQ ID NO: 16083 - DNA, 19 bp, Homo sapiens
cacctgccttttgtgggct

SEQ ID NO: 16084 - DNA, 19 bp, Homo sapiens
acctgccttttgtgggcta

SEQ ID NO: 16085 - DNA, 19 bp, Homo sapiens
cctgccttttgtgggctac

SEQ ID NO: 16086 - DNA, 19 bp, Homo sapiens
ctgccttttgtgggctact

SEQ ID NO: 16087 - DNA, 19 bp, Homo sapiens
tgccttttgtgggctactc

SEQ ID NO: 16088 - DNA, 19 bp, Homo sapiens
gccttttgtgggctactcc

SEQ ID NO: 16089 - DNA, 19 bp, Homo sapiens
ccttttgtgggctactcct

SEQ ID NO: 16090 - DNA, 19 bp, Homo sapiens
cttttgtgggctactccta

SEQ ID NO: 16091 - DNA, 19 bp, Homo sapiens
ttttgtgggctactcctac

SEQ ID NO: 16092 - DNA, 19 bp, Homo sapiens
tttgtgggctactcctact

SEQ ID NO: 16093 - DNA, 19 bp, Homo sapiens
ttgtgggctactcctactc

SEQ ID NO: 16094 - DNA, 19 bp, Homo sapiens
tgtgggctactcctactcc

SEQ ID NO: 16095 - DNA, 19 bp, Homo sapiens
gtgggctactcctactcct

SEQ ID NO: 16096 - DNA, 19 bp, Homo sapiens
tgggctactcctactcctg

SEQ ID NO: 16097 - DNA, 19 bp, Homo sapiens
gggctactcctactcctgc

SEQ ID NO: 16098 - DNA, 19 bp, Homo sapiens
ggctactcctactcctgca

SEQ ID NO: 16099 - DNA, 19 bp, Homo sapiens
gctactcctactcctgcat

SEQ ID NO: 16100 - DNA, 19 bp, Homo sapiens
ctactcctactcctgcatg

SEQ ID NO: 16101 - DNA, 19 bp, Homo sapiens
tactcctactcctgcatgg

SEQ ID NO: 16102 - DNA, 19 bp, Homo sapiens
actcctactcctgcatggc

SEQ ID NO: 16103 - DNA, 19 bp, Homo sapiens
ctcctactcctgcatggcc

SEQ ID NO: 16104 - DNA, 19 bp, Homo sapiens
tcctactcctgcatggccc

SEQ ID NO: 16105 - DNA, 19 bp, Homo sapiens
cctactcctgcatggccct

SEQ ID NO: 16106 - DNA, 19 bp, Homo sapiens
ctactcctgcatggccctc

SEQ ID NO: 16107 - DNA, 19 bp, Homo sapiens
tactcctgcatggccctca

SEQ ID NO: 16108 - DNA, 19 bp, Homo sapiens
actcctgcatggccctcag

SEQ ID NO: 16109 - DNA, 19 bp, Homo sapiens
ctcctgcatggccctcagg

SEQ ID NO: 16110 - DNA, 19 bp, Homo sapiens
tcctgcatggccctcaggg

SEQ ID NO: 16111 - DNA, 19 bp, Homo sapiens
cctgcatggccctcaggga

SEQ ID NO: 16112 - DNA, 19 bp, Homo sapiens
ctgcatggccctcagggac

SEQ ID NO: 16113 - DNA, 19 bp, Homo sapiens
tgcatggccctcagggaca

SEQ ID NO: 16114 - DNA, 19 bp, Homo sapiens
gcatggccctcagggacag

SEQ ID NO: 16115 - DNA, 19 bp, Homo sapiens
catggccctcagggacagt

SEQ ID NO: 16116 - DNA, 19 bp, Homo sapiens
atggccctcagggacagtg

SEQ ID NO: 16117 - DNA, 19 bp, Homo sapiens
tggccctcagggacagtga

SEQ ID NO: 16118 - DNA, 19 bp, Homo sapiens
ggccctcagggacagtgag

SEQ ID NO: 16119 - DNA, 19 bp, Homo sapiens
gccctcagggacagtgagg

SEQ ID NO: 16120 - DNA, 19 bp, Homo sapiens
ccctcagggacagtgaggt

SEQ ID NO: 16121 - DNA, 19 bp, Homo sapiens
cctcagggacagtgaggtc

SEQ ID NO: 16122 - DNA, 19 bp, Homo sapiens
ctcagggacagtgaggtcc

SEQ ID NO: 16123 - DNA, 19 bp, Homo sapiens
tcagggacagtgaggtccc

SEQ ID NO: 16124 - DNA, 19 bp, Homo sapiens
cagggacagtgaggtccca

SEQ ID NO: 16125 - DNA, 19 bp, Homo sapiens
agggacagtgaggtcccag

SEQ ID NO: 16126 - DNA, 19 bp, Homo sapiens
gggacagtgaggtcccagg

SEQ ID NO: 16127 - DNA, 19 bp, Homo sapiens
ggacagtgaggtcccaggc

SEQ ID NO: 16128 - DNA, 19 bp, Homo sapiens
gacagtgaggtcccaggcc

SEQ ID NO: 16129 - DNA, 19 bp, Homo sapiens
acagtgaggtcccaggccc

SEQ ID NO: 16130 - DNA, 19 bp, Homo sapiens
cagtgaggtcccaggcccc

SEQ ID NO: 16131 - DNA, 19 bp, Homo sapiens
agtgaggtcccaggcccca

SEQ ID NO: 16132 - DNA, 19 bp, Homo sapiens
gtgaggtcccaggccccac

SEQ ID NO: 16133 - DNA, 19 bp, Homo sapiens
tgaggtcccaggccccaca

SEQ ID NO: 16134 - DNA, 19 bp, Homo sapiens
gaggtcccaggccccacac

SEQ ID NO: 16135 - DNA, 19 bp, Homo sapiens
aggtcccaggccccacacc

SEQ ID NO: 16136 - DNA, 19 bp, Homo sapiens
ggtcccaggccccacaccc

SEQ ID NO: 16137 - DNA, 19 bp, Homo sapiens
gtcccaggccccacaccca

SEQ ID NO: 16138 - DNA, 19 bp, Homo sapiens
tcccaggccccacacccat

SEQ ID NO: 16139 - DNA, 19 bp, Homo sapiens
cccaggccccacacccatg

SEQ ID NO: 16140 - DNA, 19 bp, Homo sapiens
ccaggccccacacccatgg

SEQ ID NO: 16141 - DNA, 19 bp, Homo sapiens
caggccccacacccatgga

SEQ ID NO: 16142 - DNA, 19 bp, Homo sapiens
aggccccacacccatggaa

SEQ ID NO: 16143 - DNA, 19 bp, Homo sapiens
ggccccacacccatggaac

SEQ ID NO: 16144 - DNA, 19 bp, Homo sapiens
gccccacacccatggaact

SEQ ID NO: 16145 - DNA, 19 bp, Homo sapiens
ccccacacccatggaactg

SEQ ID NO: 16146 - DNA, 19 bp, Homo sapiens
cccacacccatggaactgg

SEQ ID NO: 16147 - DNA, 19 bp, Homo sapiens
ccacacccatggaactgga

SEQ ID NO: 16148 - DNA, 19 bp, Homo sapiens
cacacccatggaactggag

SEQ ID NO: 16149 - DNA, 19 bp, Homo sapiens
acacccatggaactggagg

SEQ ID NO: 16150 - DNA, 19 bp, Homo sapiens
cacccatggaactggaggc

SEQ ID NO: 16151 - DNA, 19 bp, Homo sapiens
acccatggaactggaggcc

SEQ ID NO: 16152 - DNA, 19 bp, Homo sapiens
cccatggaactggaggccg

SEQ ID NO: 16153 - DNA, 19 bp, Homo sapiens
ccatggaactggaggccga

SEQ ID NO: 16154 - DNA, 19 bp, Homo sapiens
catggaactggaggccgag

SEQ ID NO: 16155 - DNA, 19 bp, Homo sapiens
atggaactggaggccgagc

SEQ ID NO: 16156 - DNA, 19 bp, Homo sapiens
tggaactggaggccgagca

SEQ ID NO: 16157 - DNA, 19 bp, Homo sapiens
ggaactggaggccgagcag

SEQ ID NO: 16158 - DNA, 19 bp, Homo sapiens
gaactggaggccgagcagc

SEQ ID NO: 16159 - DNA, 19 bp, Homo sapiens
aactggaggccgagcagct

SEQ ID NO: 16160 - DNA, 19 bp, Homo sapiens
actggaggccgagcagctg

SEQ ID NO: 16161 - DNA, 19 bp, Homo sapiens
ctggaggccgagcagctgc

SEQ ID NO: 16162 - DNA, 19 bp, Homo sapiens
tggaggccgagcagctgct

SEQ ID NO: 16163 - DNA, 19 bp, Homo sapiens
ggaggccgagcagctgctt

SEQ ID NO: 16164 - DNA, 19 bp, Homo sapiens
gaggccgagcagctgcttg

SEQ ID NO: 16165 - DNA, 19 bp, Homo sapiens
aggccgagcagctgcttga

SEQ ID NO: 16166 - DNA, 19 bp, Homo sapiens
ggccgagcagctgcttgag

SEQ ID NO: 16167 - DNA, 19 bp, Homo sapiens
gccgagcagctgcttgagc

SEQ ID NO: 16168 - DNA, 19 bp, Homo sapiens
ccgagcagctgcttgagcc

SEQ ID NO: 16169 - DNA, 19 bp, Homo sapiens
cgagcagctgcttgagcca

SEQ ID NO: 16170 - DNA, 19 bp, Homo sapiens
gagcagctgcttgagccac

SEQ ID NO: 16171 - DNA, 19 bp, Homo sapiens
agcagctgcttgagccaca

SEQ ID NO: 16172 - DNA, 19 bp, Homo sapiens
gcagctgcttgagccacac

SEQ ID NO: 16173 - DNA, 19 bp, Homo sapiens
cagctgcttgagccacacg

SEQ ID NO: 16174 - DNA, 19 bp, Homo sapiens
agctgcttgagccacacgt

SEQ ID NO: 16175 - DNA, 19 bp, Homo sapiens
gctgcttgagccacacgtg

SEQ ID NO: 16176 - DNA, 19 bp, Homo sapiens
ctgcttgagccacacgtgc

SEQ ID NO: 16177 - DNA, 19 bp, Homo sapiens
tgcttgagccacacgtgca

SEQ ID NO: 16178 - DNA, 19 bp, Homo sapiens
gcttgagccacacgtgcaa

SEQ ID NO: 16179 - DNA, 19 bp, Homo sapiens
cttgagccacacgtgcaag

SEQ ID NO: 16180 - DNA, 19 bp, Homo sapiens
ttgagccacacgtgcaagc

SEQ ID NO: 16181 - DNA, 19 bp, Homo sapiens
tgagccacacgtgcaagcg

SEQ ID NO: 16182 - DNA, 19 bp, Homo sapiens
gagccacacgtgcaagcgc

SEQ ID NO: 16183 - DNA, 19 bp, Homo sapiens
agccacacgtgcaagcgcc

SEQ ID NO: 16184 - DNA, 19 bp, Homo sapiens
gccacacgtgcaagcgccc

SEQ ID NO: 16185 - DNA, 19 bp, Homo sapiens
ccacacgtgcaagcgccca

SEQ ID NO: 16186 - DNA, 19 bp, Homo sapiens
cacacgtgcaagcgcccag

SEQ ID NO: 16187 - DNA, 19 bp, Homo sapiens
acacgtgcaagcgcccagc

SEQ ID NO: 16188 - DNA, 19 bp, Homo sapiens
cacgtgcaagcgcccagcc

SEQ ID NO: 16189 - DNA, 19 bp, Homo sapiens
acgtgcaagcgcccagcct

SEQ ID NO: 16190 - DNA, 19 bp, Homo sapiens
cgtgcaagcgcccagcctg

SEQ ID NO: 16191 - DNA, 19 bp, Homo sapiens
gtgcaagcgcccagcctgg

SEQ ID NO: 16192 - DNA, 19 bp, Homo sapiens
tgcaagcgcccagcctgga

SEQ ID NO: 16193 - DNA, 19 bp, Homo sapiens
gcaagcgcccagcctggag

SEQ ID NO: 16194 - DNA, 19 bp, Homo sapiens
caagcgcccagcctggagc

SEQ ID NO: 16195 - DNA, 19 bp, Homo sapiens
aagcgcccagcctggagcc

SEQ ID NO: 16196 - DNA, 19 bp, Homo sapiens
agcgcccagcctggagccc

SEQ ID NO: 16197 - DNA, 19 bp, Homo sapiens
gcgcccagcctggagccct

SEQ ID NO: 16198 - DNA, 19 bp, Homo sapiens
cgcccagcctggagccctc

SEQ ID NO: 16199 - DNA, 19 bp, Homo sapiens
gcccagcctggagccctcg

SEQ ID NO: 16200 - DNA, 19 bp, Homo sapiens
cccagcctggagccctcgg

SEQ ID NO: 16201 - DNA, 19 bp, Homo sapiens
ccagcctggagccctcggt

SEQ ID NO: 16202 - DNA, 19 bp, Homo sapiens
cagcctggagccctcggtg

SEQ ID NO: 16203 - DNA, 19 bp, Homo sapiens
agcctggagccctcggtgt

SEQ ID NO: 16204 - DNA, 19 bp, Homo sapiens
gcctggagccctcggtgtc

SEQ ID NO: 16205 - DNA, 19 bp, Homo sapiens
cctggagccctcggtgtcc

SEQ ID NO: 16206 - DNA, 19 bp, Homo sapiens
ctggagccctcggtgtccc

SEQ ID NO: 16207 - DNA, 19 bp, Homo sapiens
tggagccctcggtgtcccc

SEQ ID NO: 16208 - DNA, 19 bp, Homo sapiens
ggagccctcggtgtcccca

SEQ ID NO: 16209 - DNA, 19 bp, Homo sapiens
gagccctcggtgtccccac

SEQ ID NO: 16210 - DNA, 19 bp, Homo sapiens
agccctcggtgtccccaca

SEQ ID NO: 16211 - DNA, 19 bp, Homo sapiens
gccctcggtgtccccacag

SEQ ID NO: 16212 - DNA, 19 bp, Homo sapiens
ccctcggtgtccccacagg

SEQ ID NO: 16213 - DNA, 19 bp, Homo sapiens
cctcggtgtccccacagga

SEQ ID NO: 16214 - DNA, 19 bp, Homo sapiens
ctcggtgtccccacaggat

SEQ ID NO: 16215 - DNA, 19 bp, Homo sapiens
tcggtgtccccacaggatg

SEQ ID NO: 16216 - DNA, 19 bp, Homo sapiens
cggtgtccccacaggatga

SEQ ID NO: 16217 - DNA, 19 bp, Homo sapiens
ggtgtccccacaggatgaa

SEQ ID NO: 16218 - DNA, 19 bp, Homo sapiens
gtgtccccacaggatgaaa

SEQ ID NO: 16219 - DNA, 19 bp, Homo sapiens
tgtccccacaggatgaaac

SEQ ID NO: 16220 - DNA, 19 bp, Homo sapiens
gtccccacaggatgaaaca

SEQ ID NO: 16221 - DNA, 19 bp, Homo sapiens
tccccacaggatgaaacag

SEQ ID NO: 16222 - DNA, 19 bp, Homo sapiens
ccccacaggatgaaacagc

SEQ ID NO: 16223 - DNA, 19 bp, Homo sapiens
cccacaggatgaaacagct

SEQ ID NO: 16224 - DNA, 19 bp, Homo sapiens
ccacaggatgaaacagctg

SEQ ID NO: 16225 - DNA, 19 bp, Homo sapiens
cacaggatgaaacagctga

SEQ ID NO: 16226 - DNA, 19 bp, Homo sapiens
acaggatgaaacagctgaa

SEQ ID NO: 16227 - DNA, 19 bp, Homo sapiens
caggatgaaacagctgaag

SEQ ID NO: 16228 - DNA, 19 bp, Homo sapiens
aggatgaaacagctgaagt

SEQ ID NO: 16229 - DNA, 19 bp, Homo sapiens
ggatgaaacagctgaagtg

SEQ ID NO: 16230 - DNA, 19 bp, Homo sapiens
gatgaaacagctgaagtgg

SEQ ID NO: 16231 - DNA, 19 bp, Homo sapiens
atgaaacagctgaagtggc

SEQ ID NO: 16232 - DNA, 19 bp, Homo sapiens
tgaaacagctgaagtggca

SEQ ID NO: 16233 - DNA, 19 bp, Homo sapiens
gaaacagctgaagtggcag

SEQ ID NO: 16234 - DNA, 19 bp, Homo sapiens
aaacagctgaagtggcagt

SEQ ID NO: 16235 - DNA, 19 bp, Homo sapiens
aacagctgaagtggcagtt

SEQ ID NO: 16236 - DNA, 19 bp, Homo sapiens
acagctgaagtggcagttc

SEQ ID NO: 16237 - DNA, 19 bp, Homo sapiens
cagctgaagtggcagttcc

SEQ ID NO: 16238 - DNA, 19 bp, Homo sapiens
agctgaagtggcagttcca

SEQ ID NO: 16239 - DNA, 19 bp, Homo sapiens
gctgaagtggcagttccag

SEQ ID NO: 16240 - DNA, 19 bp, Homo sapiens
ctgaagtggcagttccagc

SEQ ID NO: 16241 - DNA, 19 bp, Homo sapiens
tgaagtggcagttccagcg

SEQ ID NO: 16242 - DNA, 19 bp, Homo sapiens
gaagtggcagttccagcgg

SEQ ID NO: 16243 - DNA, 19 bp, Homo sapiens
aagtggcagttccagcggc

SEQ ID NO: 16244 - DNA, 19 bp, Homo sapiens
agtggcagttccagcggct

SEQ ID NO: 16245 - DNA, 19 bp, Homo sapiens
gtggcagttccagcggctg

SEQ ID NO: 16246 - DNA, 19 bp, Homo sapiens
tggcagttccagcggctgt

SEQ ID NO: 16247 - DNA, 19 bp, Homo sapiens
ggcagttccagcggctgtc

SEQ ID NO: 16248 - DNA, 19 bp, Homo sapiens
gcagttccagcggctgtcc

SEQ ID NO: 16249 - DNA, 19 bp, Homo sapiens
cagttccagcggctgtccc

SEQ ID NO: 16250 - DNA, 19 bp, Homo sapiens
agttccagcggctgtccct

SEQ ID NO: 16251 - DNA, 19 bp, Homo sapiens
gttccagcggctgtccctg

SEQ ID NO: 16252 - DNA, 19 bp, Homo sapiens
ttccagcggctgtccctgc

SEQ ID NO: 16253 - DNA, 19 bp, Homo sapiens
tccagcggctgtccctgcg

SEQ ID NO: 16254 - DNA, 19 bp, Homo sapiens
ccagcggctgtccctgcgg

SEQ ID NO: 16255 - DNA, 19 bp, Homo sapiens
cagcggctgtccctgcggc

SEQ ID NO: 16256 - DNA, 19 bp, Homo sapiens
agcggctgtccctgcggca

SEQ ID NO: 16257 - DNA, 19 bp, Homo sapiens
gcggctgtccctgcggcag

SEQ ID NO: 16258 - DNA, 19 bp, Homo sapiens
cggctgtccctgcggcaga

SEQ ID NO: 16259 - DNA, 19 bp, Homo sapiens
ggctgtccctgcggcagag

SEQ ID NO: 16260 - DNA, 19 bp, Homo sapiens
gctgtccctgcggcagagg

SEQ ID NO: 16261 - DNA, 19 bp, Homo sapiens
ctgtccctgcggcagaggc

SEQ ID NO: 16262 - DNA, 19 bp, Homo sapiens
tgtccctgcggcagaggct

SEQ ID NO: 16263 - DNA, 19 bp, Homo sapiens
gtccctgcggcagaggctg

SEQ ID NO: 16264 - DNA, 19 bp, Homo sapiens
tccctgcggcagaggctga

SEQ ID NO: 16265 - DNA, 19 bp, Homo sapiens
ccctgcggcagaggctgag

SEQ ID NO: 16266 - DNA, 19 bp, Homo sapiens
cctgcggcagaggctgagg

SEQ ID NO: 16267 - DNA, 19 bp, Homo sapiens
ctgcggcagaggctgaggc

SEQ ID NO: 16268 - DNA, 19 bp, Homo sapiens
tgcggcagaggctgaggcc

SEQ ID NO: 16269 - DNA, 19 bp, Homo sapiens
gcggcagaggctgaggccg

SEQ ID NO: 16270 - DNA, 19 bp, Homo sapiens
cggcagaggctgaggccga

SEQ ID NO: 16271 - DNA, 19 bp, Homo sapiens
ggcagaggctgaggccgag

SEQ ID NO: 16272 - DNA, 19 bp, Homo sapiens
gcagaggctgaggccgagg

SEQ ID NO: 16273 - DNA, 19 bp, Homo sapiens
cagaggctgaggccgaggt

SEQ ID NO: 16274 - DNA, 19 bp, Homo sapiens
agaggctgaggccgaggtg

SEQ ID NO: 16275 - DNA, 19 bp, Homo sapiens
gaggctgaggccgaggtga

SEQ ID NO: 16276 - DNA, 19 bp, Homo sapiens
aggctgaggccgaggtgac

SEQ ID NO: 16277 - DNA, 19 bp, Homo sapiens
ggctgaggccgaggtgacg

SEQ ID NO: 16278 - DNA, 19 bp, Homo sapiens
gctgaggccgaggtgacgc

SEQ ID NO: 16279 - DNA, 19 bp, Homo sapiens
ctgaggccgaggtgacgct

SEQ ID NO: 16280 - DNA, 19 bp, Homo sapiens
tgaggccgaggtgacgctg

SEQ ID NO: 16281 - DNA, 19 bp, Homo sapiens
gaggccgaggtgacgctgc

SEQ ID NO: 16282 - DNA, 19 bp, Homo sapiens
aggccgaggtgacgctgcg

SEQ ID NO: 16283 - DNA, 19 bp, Homo sapiens
ggccgaggtgacgctgcgg

SEQ ID NO: 16284 - DNA, 19 bp, Homo sapiens
gccgaggtgacgctgcggg

SEQ ID NO: 16285 - DNA, 19 bp, Homo sapiens
ccgaggtgacgctgcggga

SEQ ID NO: 16286 - DNA, 19 bp, Homo sapiens
cgaggtgacgctgcgggag

SEQ ID NO: 16287 - DNA, 19 bp, Homo sapiens
gaggtgacgctgcgggagc

SEQ ID NO: 16288 - DNA, 19 bp, Homo sapiens
aggtgacgctgcgggagct

SEQ ID NO: 16289 - DNA, 19 bp, Homo sapiens
ggtgacgctgcgggagctc

SEQ ID NO: 16290 - DNA, 19 bp, Homo sapiens
gtgacgctgcgggagctcc

SEQ ID NO: 16291 - DNA, 19 bp, Homo sapiens
tgacgctgcgggagctcca

SEQ ID NO: 16292 - DNA, 19 bp, Homo sapiens
gacgctgcgggagctccag

SEQ ID NO: 16293 - DNA, 19 bp, Homo sapiens
acgctgcgggagctccagg

SEQ ID NO: 16294 - DNA, 19 bp, Homo sapiens
cgctgcgggagctccagga

SEQ ID NO: 16295 - DNA, 19 bp, Homo sapiens
gctgcgggagctccaggaa

SEQ ID NO: 16296 - DNA, 19 bp, Homo sapiens
ctgcgggagctccaggaag

SEQ ID NO: 16297 - DNA, 19 bp, Homo sapiens
tgcgggagctccaggaagc

SEQ ID NO: 16298 - DNA, 19 bp, Homo sapiens
gcgggagctccaggaagcc

SEQ ID NO: 16299 - DNA, 19 bp, Homo sapiens
cgggagctccaggaagccc

SEQ ID NO: 16300 - DNA, 19 bp, Homo sapiens
gggagctccaggaagccct

SEQ ID NO: 16301 - DNA, 19 bp, Homo sapiens
ggagctccaggaagccctg

SEQ ID NO: 16302 - DNA, 19 bp, Homo sapiens
gagctccaggaagccctgg

SEQ ID NO: 16303 - DNA, 19 bp, Homo sapiens
agctccaggaagccctgga

SEQ ID NO: 16304 - DNA, 19 bp, Homo sapiens
gctccaggaagccctggag

SEQ ID NO: 16305 - DNA, 19 bp, Homo sapiens
ctccaggaagccctggagg

SEQ ID NO: 16306 - DNA, 19 bp, Homo sapiens
tccaggaagccctggagga

SEQ ID NO: 16307 - DNA, 19 bp, Homo sapiens
ccaggaagccctggaggag

SEQ ID NO: 16308 - DNA, 19 bp, Homo sapiens
caggaagccctggaggagg

SEQ ID NO: 16309 - DNA, 19 bp, Homo sapiens
aggaagccctggaggagga

SEQ ID NO: 16310 - DNA, 19 bp, Homo sapiens
ggaagccctggaggaggag

SEQ ID NO: 16311 - DNA, 19 bp, Homo sapiens
gaagccctggaggaggagg

SEQ ID NO: 16312 - DNA, 19 bp, Homo sapiens
aagccctggaggaggaggt

SEQ ID NO: 16313 - DNA, 19 bp, Homo sapiens
agccctggaggaggaggtg

SEQ ID NO: 16314 - DNA, 19 bp, Homo sapiens
gccctggaggaggaggtgc

SEQ ID NO: 16315 - DNA, 19 bp, Homo sapiens
ccctggaggaggaggtgct

SEQ ID NO: 16316 - DNA, 19 bp, Homo sapiens
cctggaggaggaggtgctc

SEQ ID NO: 16317 - DNA, 19 bp, Homo sapiens
ctggaggaggaggtgctca

SEQ ID NO: 16318 - DNA, 19 bp, Homo sapiens
tggaggaggaggtgctcac

SEQ ID NO: 16319 - DNA, 19 bp, Homo sapiens
ggaggaggaggtgctcacc

SEQ ID NO: 16320 - DNA, 19 bp, Homo sapiens
gaggaggaggtgctcaccc

SEQ ID NO: 16321 - DNA, 19 bp, Homo sapiens
aggaggaggtgctcacccg

SEQ ID NO: 16322 - DNA, 19 bp, Homo sapiens
ggaggaggtgctcacccgg

SEQ ID NO: 16323 - DNA, 19 bp, Homo sapiens
gaggaggtgctcacccggc

SEQ ID NO: 16324 - DNA, 19 bp, Homo sapiens
aggaggtgctcacccggca

SEQ ID NO: 16325 - DNA, 19 bp, Homo sapiens
ggaggtgctcacccggcag

SEQ ID NO: 16326 - DNA, 19 bp, Homo sapiens
gaggtgctcacccggcaga

SEQ ID NO: 16327 - DNA, 19 bp, Homo sapiens
aggtgctcacccggcagag

SEQ ID NO: 16328 - DNA, 19 bp, Homo sapiens
ggtgctcacccggcagagc

SEQ ID NO: 16329 - DNA, 19 bp, Homo sapiens
gtgctcacccggcagagcc

SEQ ID NO: 16330 - DNA, 19 bp, Homo sapiens
tgctcacccggcagagcct

SEQ ID NO: 16331 - DNA, 19 bp, Homo sapiens
gctcacccggcagagcctg

SEQ ID NO: 16332 - DNA, 19 bp, Homo sapiens
ctcacccggcagagcctga

SEQ ID NO: 16333 - DNA, 19 bp, Homo sapiens
tcacccggcagagcctgag

SEQ ID NO: 16334 - DNA, 19 bp, Homo sapiens
cacccggcagagcctgagc

SEQ ID NO: 16335 - DNA, 19 bp, Homo sapiens
acccggcagagcctgagcc

SEQ ID NO: 16336 - DNA, 19 bp, Homo sapiens
cccggcagagcctgagccg

SEQ ID NO: 16337 - DNA, 19 bp, Homo sapiens
ccggcagagcctgagccgg

SEQ ID NO: 16338 - DNA, 19 bp, Homo sapiens
cggcagagcctgagccggg

SEQ ID NO: 16339 - DNA, 19 bp, Homo sapiens
ggcagagcctgagccggga

SEQ ID NO: 16340 - DNA, 19 bp, Homo sapiens
gcagagcctgagccgggag

SEQ ID NO: 16341 - DNA, 19 bp, Homo sapiens
cagagcctgagccgggaga

SEQ ID NO: 16342 - DNA, 19 bp, Homo sapiens
agagcctgagccgggagat

SEQ ID NO: 16343 - DNA, 19 bp, Homo sapiens
gagcctgagccgggagatg

SEQ ID NO: 16344 - DNA, 19 bp, Homo sapiens
agcctgagccgggagatgg

SEQ ID NO: 16345 - DNA, 19 bp, Homo sapiens
gcctgagccgggagatgga

SEQ ID NO: 16346 - DNA, 19 bp, Homo sapiens
cctgagccgggagatggag

SEQ ID NO: 16347 - DNA, 19 bp, Homo sapiens
ctgagccgggagatggagg

SEQ ID NO: 16348 - DNA, 19 bp, Homo sapiens
tgagccgggagatggaggc

SEQ ID NO: 16349 - DNA, 19 bp, Homo sapiens
gagccgggagatggaggcc

SEQ ID NO: 16350 - DNA, 19 bp, Homo sapiens
agccgggagatggaggcca

SEQ ID NO: 16351 - DNA, 19 bp, Homo sapiens
gccgggagatggaggccat

SEQ ID NO: 16352 - DNA, 19 bp, Homo sapiens
ccgggagatggaggccatc

SEQ ID NO: 16353 - DNA, 19 bp, Homo sapiens
cgggagatggaggccatcc

SEQ ID NO: 16354 - DNA, 19 bp, Homo sapiens
gggagatggaggccatccg

SEQ ID NO: 16355 - DNA, 19 bp, Homo sapiens
ggagatggaggccatccgc

SEQ ID NO: 16356 - DNA, 19 bp, Homo sapiens
gagatggaggccatccgca

SEQ ID NO: 16357 - DNA, 19 bp, Homo sapiens
agatggaggccatccgcac

SEQ ID NO: 16358 - DNA, 19 bp, Homo sapiens
gatggaggccatccgcacg

SEQ ID NO: 16359 - DNA, 19 bp, Homo sapiens
atggaggccatccgcacgg

SEQ ID NO: 16360 - DNA, 19 bp, Homo sapiens
tggaggccatccgcacgga

SEQ ID NO: 16361 - DNA, 19 bp, Homo sapiens
ggaggccatccgcacggac

SEQ ID NO: 16362 - DNA, 19 bp, Homo sapiens
gaggccatccgcacggaca

SEQ ID NO: 16363 - DNA, 19 bp, Homo sapiens
aggccatccgcacggacaa

SEQ ID NO: 16364 - DNA, 19 bp, Homo sapiens
ggccatccgcacggacaac

SEQ ID NO: 16365 - DNA, 19 bp, Homo sapiens
gccatccgcacggacaacc

SEQ ID NO: 16366 - DNA, 19 bp, Homo sapiens
ccatccgcacggacaacca

SEQ ID NO: 16367 - DNA, 19 bp, Homo sapiens
catccgcacggacaaccag

SEQ ID NO: 16368 - DNA, 19 bp, Homo sapiens
atccgcacggacaaccaga

SEQ ID NO: 16369 - DNA, 19 bp, Homo sapiens
tccgcacggacaaccagaa

SEQ ID NO: 16370 - DNA, 19 bp, Homo sapiens
ccgcacggacaaccagaac

SEQ ID NO: 16371 - DNA, 19 bp, Homo sapiens
cgcacggacaaccagaact

SEQ ID NO: 16372 - DNA, 19 bp, Homo sapiens
gcacggacaaccagaactt

SEQ ID NO: 16373 - DNA, 19 bp, Homo sapiens
cacggacaaccagaacttc

SEQ ID NO: 16374 - DNA, 19 bp, Homo sapiens
acggacaaccagaacttcg

SEQ ID NO: 16375 - DNA, 19 bp, Homo sapiens
cggacaaccagaacttcgc

SEQ ID NO: 16376 - DNA, 19 bp, Homo sapiens
ggacaaccagaacttcgcc

SEQ ID NO: 16377 - DNA, 19 bp, Homo sapiens
gacaaccagaacttcgcca

SEQ ID NO: 16378 - DNA, 19 bp, Homo sapiens
acaaccagaacttcgccag

SEQ ID NO: 16379 - DNA, 19 bp, Homo sapiens
caaccagaacttcgccagt

SEQ ID NO: 16380 - DNA, 19 bp, Homo sapiens
aaccagaacttcgccagtc

SEQ ID NO: 16381 - DNA, 19 bp, Homo sapiens
accagaacttcgccagtca

SEQ ID NO: 16382 - DNA, 19 bp, Homo sapiens
ccagaacttcgccagtcaa

SEQ ID NO: 16383 - DNA, 19 bp, Homo sapiens
cagaacttcgccagtcaac

SEQ ID NO: 16384 - DNA, 19 bp, Homo sapiens
agaacttcgccagtcaact

SEQ ID NO: 16385 - DNA, 19 bp, Homo sapiens
gaacttcgccagtcaacta

SEQ ID NO: 16386 - DNA, 19 bp, Homo sapiens
aacttcgccagtcaactac

SEQ ID NO: 16387 - DNA, 19 bp, Homo sapiens
acttcgccagtcaactacg

SEQ ID NO: 16388 - DNA, 19 bp, Homo sapiens
cttcgccagtcaactacgc

SEQ ID NO: 16389 - DNA, 19 bp, Homo sapiens
ttcgccagtcaactacgcg

SEQ ID NO: 16390 - DNA, 19 bp, Homo sapiens
tcgccagtcaactacgcga

SEQ ID NO: 16391 - DNA, 19 bp, Homo sapiens
cgccagtcaactacgcgag

SEQ ID NO: 16392 - DNA, 19 bp, Homo sapiens
gccagtcaactacgcgagg

SEQ ID NO: 16393 - DNA, 19 bp, Homo sapiens
ccagtcaactacgcgaggc

SEQ ID NO: 16394 - DNA, 19 bp, Homo sapiens
cagtcaactacgcgaggca

SEQ ID NO: 16395 - DNA, 19 bp, Homo sapiens
agtcaactacgcgaggcag

SEQ ID NO: 16396 - DNA, 19 bp, Homo sapiens
gtcaactacgcgaggcaga

SEQ ID NO: 16397 - DNA, 19 bp, Homo sapiens
tcaactacgcgaggcagag

SEQ ID NO: 16398 - DNA, 19 bp, Homo sapiens
caactacgcgaggcagagg

SEQ ID NO: 16399 - DNA, 19 bp, Homo sapiens
aactacgcgaggcagaggc

SEQ ID NO: 16400 - DNA, 19 bp, Homo sapiens
actacgcgaggcagaggct

SEQ ID NO: 16401 - DNA, 19 bp, Homo sapiens
ctacgcgaggcagaggctc

SEQ ID NO: 16402 - DNA, 19 bp, Homo sapiens
tacgcgaggcagaggctcg

SEQ ID NO: 16403 - DNA, 19 bp, Homo sapiens
acgcgaggcagaggctcgg

SEQ ID NO: 16404 - DNA, 19 bp, Homo sapiens
cgcgaggcagaggctcgga

SEQ ID NO: 16405 - DNA, 19 bp, Homo sapiens
gcgaggcagaggctcggaa

SEQ ID NO: 16406 - DNA, 19 bp, Homo sapiens
cgaggcagaggctcggaac

SEQ ID NO: 16407 - DNA, 19 bp, Homo sapiens
gaggcagaggctcggaacc

SEQ ID NO: 16408 - DNA, 19 bp, Homo sapiens
aggcagaggctcggaaccg

SEQ ID NO: 16409 - DNA, 19 bp, Homo sapiens
ggcagaggctcggaaccgg

SEQ ID NO: 16410 - DNA, 19 bp, Homo sapiens
gcagaggctcggaaccggg

SEQ ID NO: 16411 - DNA, 19 bp, Homo sapiens
cagaggctcggaaccggga

SEQ ID NO: 16412 - DNA, 19 bp, Homo sapiens
agaggctcggaaccgggac

SEQ ID NO: 16413 - DNA, 19 bp, Homo sapiens
gaggctcggaaccgggacc

SEQ ID NO: 16414 - DNA, 19 bp, Homo sapiens
aggctcggaaccgggacct

SEQ ID NO: 16415 - DNA, 19 bp, Homo sapiens
ggctcggaaccgggaccta

SEQ ID NO: 16416 - DNA, 19 bp, Homo sapiens
gctcggaaccgggacctag

SEQ ID NO: 16417 - DNA, 19 bp, Homo sapiens
ctcggaaccgggacctaga

SEQ ID NO: 16418 - DNA, 19 bp, Homo sapiens
tcggaaccgggacctagag

SEQ ID NO: 16419 - DNA, 19 bp, Homo sapiens
cggaaccgggacctagagg

SEQ ID NO: 16420 - DNA, 19 bp, Homo sapiens
ggaaccgggacctagaggc

SEQ ID NO: 16421 - DNA, 19 bp, Homo sapiens
gaaccgggacctagaggca

SEQ ID NO: 16422 - DNA, 19 bp, Homo sapiens
aaccgggacctagaggcac

SEQ ID NO: 16423 - DNA, 19 bp, Homo sapiens
accgggacctagaggcaca

SEQ ID NO: 16424 - DNA, 19 bp, Homo sapiens
ccgggacctagaggcacac

SEQ ID NO: 16425 - DNA, 19 bp, Homo sapiens
cgggacctagaggcacacg

SEQ ID NO: 16426 - DNA, 19 bp, Homo sapiens
gggacctagaggcacacgt

SEQ ID NO: 16427 - DNA, 19 bp, Homo sapiens
ggacctagaggcacacgtc

SEQ ID NO: 16428 - DNA, 19 bp, Homo sapiens
gacctagaggcacacgtcc

SEQ ID NO: 16429 - DNA, 19 bp, Homo sapiens
acctagaggcacacgtccg

SEQ ID NO: 16430 - DNA, 19 bp, Homo sapiens
cctagaggcacacgtccgg

SEQ ID NO: 16431 - DNA, 19 bp, Homo sapiens
ctagaggcacacgtccggc

SEQ ID NO: 16432 - DNA, 19 bp, Homo sapiens
tagaggcacacgtccggca

SEQ ID NO: 16433 - DNA, 19 bp, Homo sapiens
agaggcacacgtccggcag

SEQ ID NO: 16434 - DNA, 19 bp, Homo sapiens
gaggcacacgtccggcagt

SEQ ID NO: 16435 - DNA, 19 bp, Homo sapiens
aggcacacgtccggcagtt

SEQ ID NO: 16436 - DNA, 19 bp, Homo sapiens
ggcacacgtccggcagttg

SEQ ID NO: 16437 - DNA, 19 bp, Homo sapiens
gcacacgtccggcagttgc

SEQ ID NO: 16438 - DNA, 19 bp, Homo sapiens
cacacgtccggcagttgca

SEQ ID NO: 16439 - DNA, 19 bp, Homo sapiens
acacgtccggcagttgcag

SEQ ID NO: 16440 - DNA, 19 bp, Homo sapiens
cacgtccggcagttgcagg

SEQ ID NO: 16441 - DNA, 19 bp, Homo sapiens
acgtccggcagttgcagga

SEQ ID NO: 16442 - DNA, 19 bp, Homo sapiens
cgtccggcagttgcaggag

SEQ ID NO: 16443 - DNA, 19 bp, Homo sapiens
gtccggcagttgcaggagc

SEQ ID NO: 16444 - DNA, 19 bp, Homo sapiens
tccggcagttgcaggagcg

SEQ ID NO: 16445 - DNA, 19 bp, Homo sapiens
ccggcagttgcaggagcgg

SEQ ID NO: 16446 - DNA, 19 bp, Homo sapiens
cggcagttgcaggagcgga

SEQ ID NO: 16447 - DNA, 19 bp, Homo sapiens
ggcagttgcaggagcggat

SEQ ID NO: 16448 - DNA, 19 bp, Homo sapiens
gcagttgcaggagcggatg

SEQ ID NO: 16449 - DNA, 19 bp, Homo sapiens
cagttgcaggagcggatgg

SEQ ID NO: 16450 - DNA, 19 bp, Homo sapiens
agttgcaggagcggatgga

SEQ ID NO: 16451 - DNA, 19 bp, Homo sapiens
gttgcaggagcggatggag

SEQ ID NO: 16452 - DNA, 19 bp, Homo sapiens
ttgcaggagcggatggagt

SEQ ID NO: 16453 - DNA, 19 bp, Homo sapiens
tgcaggagcggatggagtt

SEQ ID NO: 16454 - DNA, 19 bp, Homo sapiens
gcaggagcggatggagttg

SEQ ID NO: 16455 - DNA, 19 bp, Homo sapiens
caggagcggatggagttgc

SEQ ID NO: 16456 - DNA, 19 bp, Homo sapiens
aggagcggatggagttgct

SEQ ID NO: 16457 - DNA, 19 bp, Homo sapiens
ggagcggatggagttgctg

SEQ ID NO: 16458 - DNA, 19 bp, Homo sapiens
gagcggatggagttgctgc

SEQ ID NO: 16459 - DNA, 19 bp, Homo sapiens
agcggatggagttgctgca

SEQ ID NO: 16460 - DNA, 19 bp, Homo sapiens
gcggatggagttgctgcag

SEQ ID NO: 16461 - DNA, 19 bp, Homo sapiens
cggatggagttgctgcagg

SEQ ID NO: 16462 - DNA, 19 bp, Homo sapiens
ggatggagttgctgcaggc

SEQ ID NO: 16463 - DNA, 19 bp, Homo sapiens
gatggagttgctgcaggca

SEQ ID NO: 16464 - DNA, 19 bp, Homo sapiens
atggagttgctgcaggcag

SEQ ID NO: 16465 - DNA, 19 bp, Homo sapiens
tggagttgctgcaggcaga

SEQ ID NO: 16466 - DNA, 19 bp, Homo sapiens
ggagttgctgcaggcagag

SEQ ID NO: 16467 - DNA, 19 bp, Homo sapiens
gagttgctgcaggcagagg

SEQ ID NO: 16468 - DNA, 19 bp, Homo sapiens
agttgctgcaggcagaggg

SEQ ID NO: 16469 - DNA, 19 bp, Homo sapiens
gttgctgcaggcagaggga

SEQ ID NO: 16470 - DNA, 19 bp, Homo sapiens
ttgctgcaggcagagggag

SEQ ID NO: 16471 - DNA, 19 bp, Homo sapiens
tgctgcaggcagagggagc

SEQ ID NO: 16472 - DNA, 19 bp, Homo sapiens
gctgcaggcagagggagcc

SEQ ID NO: 16473 - DNA, 19 bp, Homo sapiens
ctgcaggcagagggagcca

SEQ ID NO: 16474 - DNA, 19 bp, Homo sapiens
tgcaggcagagggagccac

SEQ ID NO: 16475 - DNA, 19 bp, Homo sapiens
gcaggcagagggagccaca

SEQ ID NO: 16476 - DNA, 19 bp, Homo sapiens
caggcagagggagccacag

SEQ ID NO: 16477 - DNA, 19 bp, Homo sapiens
aggcagagggagccacagg

SEQ ID NO: 16478 - DNA, 19 bp, Homo sapiens
ggcagagggagccacaggt

SEQ ID NO: 16479 - DNA, 19 bp, Homo sapiens
gcagagggagccacaggtc

SEQ ID NO: 16480 - DNA, 19 bp, Homo sapiens
cagagggagccacaggtcc

SEQ ID NO: 16481 - DNA, 19 bp, Homo sapiens
agagggagccacaggtccc

SEQ ID NO: 16482 - DNA, 19 bp, Homo sapiens
gagggagccacaggtccct

SEQ ID NO: 16483 - DNA, 19 bp, Homo sapiens
agggagccacaggtcccta

SEQ ID NO: 16484 - DNA, 19 bp, Homo sapiens
gggagccacaggtccctag

SEQ ID NO: 16485 - DNA, 19 bp, Homo sapiens
ggagccacaggtccctagg

SEQ ID NO: 16486 - DNA, 19 bp, Homo sapiens
gagccacaggtccctaggc

SEQ ID NO: 16487 - DNA, 19 bp, Homo sapiens
agccacaggtccctaggcc

SEQ ID NO: 16488 - DNA, 19 bp, Homo sapiens
gccacaggtccctaggcct

SEQ ID NO: 16489 - DNA, 19 bp, Homo sapiens
ccacaggtccctaggcctg

SEQ ID NO: 16490 - DNA, 19 bp, Homo sapiens
cacaggtccctaggcctgg

SEQ ID NO: 16491 - DNA, 19 bp, Homo sapiens
acaggtccctaggcctggc

SEQ ID NO: 16492 - DNA, 19 bp, Homo sapiens
caggtccctaggcctggcc

SEQ ID NO: 16493 - DNA, 19 bp, Homo sapiens
aggtccctaggcctggcct

SEQ ID NO: 16494 - DNA, 19 bp, Homo sapiens
ggtccctaggcctggccta

SEQ ID NO: 16495 - DNA, 19 bp, Homo sapiens
gtccctaggcctggcctat

SEQ ID NO: 16496 - DNA, 19 bp, Homo sapiens
tccctaggcctggcctatc

SEQ ID NO: 16497 - DNA, 19 bp, Homo sapiens
ccctaggcctggcctatcg

SEQ ID NO: 16498 - DNA, 19 bp, Homo sapiens
cctaggcctggcctatcgg

SEQ ID NO: 16499 - DNA, 19 bp, Homo sapiens
ctaggcctggcctatcgga

SEQ ID NO: 16500 - DNA, 19 bp, Homo sapiens
taggcctggcctatcggag

SEQ ID NO: 16501 - DNA, 19 bp, Homo sapiens
aggcctggcctatcggagg

SEQ ID NO: 16502 - DNA, 19 bp, Homo sapiens
ggcctggcctatcggaggc

SEQ ID NO: 16503 - DNA, 19 bp, Homo sapiens
gcctggcctatcggaggcg

SEQ ID NO: 16504 - DNA, 19 bp, Homo sapiens
cctggcctatcggaggcgc

SEQ ID NO: 16505 - DNA, 19 bp, Homo sapiens
ctggcctatcggaggcgct

SEQ ID NO: 16506 - DNA, 19 bp, Homo sapiens
tggcctatcggaggcgctt

SEQ ID NO: 16507 - DNA, 19 bp, Homo sapiens
ggcctatcggaggcgcttt

SEQ ID NO: 16508 - DNA, 19 bp, Homo sapiens
gcctatcggaggcgctttc

SEQ ID NO: 16509 - DNA, 19 bp, Homo sapiens
cctatcggaggcgctttcc

SEQ ID NO: 16510 - DNA, 19 bp, Homo sapiens
ctatcggaggcgctttccc

SEQ ID NO: 16511 - DNA, 19 bp, Homo sapiens
tatcggaggcgctttccct

SEQ ID NO: 16512 - DNA, 19 bp, Homo sapiens
atcggaggcgctttccctg

SEQ ID NO: 16513 - DNA, 19 bp, Homo sapiens
tcggaggcgctttccctgc

SEQ ID NO: 16514 - DNA, 19 bp, Homo sapiens
cggaggcgctttccctgct

SEQ ID NO: 16515 - DNA, 19 bp, Homo sapiens
ggaggcgctttccctgctc

SEQ ID NO: 16516 - DNA, 19 bp, Homo sapiens
gaggcgctttccctgctcc

SEQ ID NO: 16517 - DNA, 19 bp, Homo sapiens
aggcgctttccctgctcct

SEQ ID NO: 16518 - DNA, 19 bp, Homo sapiens
ggcgctttccctgctcctg

SEQ ID NO: 16519 - DNA, 19 bp, Homo sapiens
gcgctttccctgctcctgt

SEQ ID NO: 16520 - DNA, 19 bp, Homo sapiens
cgctttccctgctcctgtt

SEQ ID NO: 16521 - DNA, 19 bp, Homo sapiens
gctttccctgctcctgttc

SEQ ID NO: 16522 - DNA, 19 bp, Homo sapiens
ctttccctgctcctgttcg

SEQ ID NO: 16523 - DNA, 19 bp, Homo sapiens
tttccctgctcctgttcgc

SEQ ID NO: 16524 - DNA, 19 bp, Homo sapiens
ttccctgctcctgttcgcc

SEQ ID NO: 16525 - DNA, 19 bp, Homo sapiens
tccctgctcctgttcgccg

SEQ ID NO: 16526 - DNA, 19 bp, Homo sapiens
ccctgctcctgttcgccgt

SEQ ID NO: 16527 - DNA, 19 bp, Homo sapiens
cctgctcctgttcgccgtt

SEQ ID NO: 16528 - DNA, 19 bp, Homo sapiens
ctgctcctgttcgccgttg

SEQ ID NO: 16529 - DNA, 19 bp, Homo sapiens
tgctcctgttcgccgttgt

SEQ ID NO: 16530 - DNA, 19 bp, Homo sapiens
gctcctgttcgccgttgtt

SEQ ID NO: 16531 - DNA, 19 bp, Homo sapiens
ctcctgttcgccgttgttc

SEQ ID NO: 16532 - DNA, 19 bp, Homo sapiens
tcctgttcgccgttgttct

SEQ ID NO: 16533 - DNA, 19 bp, Homo sapiens
cctgttcgccgttgttctg

SEQ ID NO: 16534 - DNA, 19 bp, Homo sapiens
ctgttcgccgttgttctgt

SEQ ID NO: 16535 - DNA, 19 bp, Homo sapiens
tgttcgccgttgttctgtc

SEQ ID NO: 16536 - DNA, 19 bp, Homo sapiens
gttcgccgttgttctgtct

SEQ ID NO: 16537 - DNA, 19 bp, Homo sapiens
ttcgccgttgttctgtctc

SEQ ID NO: 16538 - DNA, 19 bp, Homo sapiens
tcgccgttgttctgtctcg

SEQ ID NO: 16539 - DNA, 19 bp, Homo sapiens
cgccgttgttctgtctcgt

SEQ ID NO: 16540 - DNA, 19 bp, Homo sapiens
gccgttgttctgtctcgtg

SEQ ID NO: 16541 - DNA, 19 bp, Homo sapiens
ccgttgttctgtctcgtgc

SEQ ID NO: 16542 - DNA, 19 bp, Homo sapiens
cgttgttctgtctcgtgcc

SEQ ID NO: 16543 - DNA, 19 bp, Homo sapiens
gttgttctgtctcgtgccg

SEQ ID NO: 16544 - DNA, 19 bp, Homo sapiens
ttgttctgtctcgtgccgc

SEQ ID NO: 16545 - DNA, 19 bp, Homo sapiens
tgttctgtctcgtgccgcc

SEQ ID NO: 16546 - DNA, 19 bp, Homo sapiens
gttctgtctcgtgccgccg

SEQ ID NO: 16547 - DNA, 19 bp, Homo sapiens
ttctgtctcgtgccgccgc

SEQ ID NO: 16548 - DNA, 19 bp, Homo sapiens
tctgtctcgtgccgccgcc

SEQ ID NO: 16549 - DNA, 19 bp, Homo sapiens
ctgtctcgtgccgccgccc

SEQ ID NO: 16550 - DNA, 19 bp, Homo sapiens
tgtctcgtgccgccgccct

SEQ ID NO: 16551 - DNA, 19 bp, Homo sapiens
gtctcgtgccgccgccctg

SEQ ID NO: 16552 - DNA, 19 bp, Homo sapiens
tctcgtgccgccgccctgg

SEQ ID NO: 16553 - DNA, 19 bp, Homo sapiens
ctcgtgccgccgccctggg

SEQ ID NO: 16554 - DNA, 19 bp, Homo sapiens
tcgtgccgccgccctgggc

SEQ ID NO: 16555 - DNA, 19 bp, Homo sapiens
cgtgccgccgccctgggct

SEQ ID NO: 16556 - DNA, 19 bp, Homo sapiens
gtgccgccgccctgggctg

SEQ ID NO: 16557 - DNA, 19 bp, Homo sapiens
tgccgccgccctgggctgc

SEQ ID NO: 16558 - DNA, 19 bp, Homo sapiens
gccgccgccctgggctgca

SEQ ID NO: 16559 - DNA, 19 bp, Homo sapiens
ccgccgccctgggctgcat

SEQ ID NO: 16560 - DNA, 19 bp, Homo sapiens
cgccgccctgggctgcatt

SEQ ID NO: 16561 - DNA, 19 bp, Homo sapiens
gccgccctgggctgcattg

SEQ ID NO: 16562 - DNA, 19 bp, Homo sapiens
ccgccctgggctgcattgg

SEQ ID NO: 16563 - DNA, 19 bp, Homo sapiens
cgccctgggctgcattggg

SEQ ID NO: 16564 - DNA, 19 bp, Homo sapiens
gccctgggctgcattgggt

SEQ ID NO: 16565 - DNA, 19 bp, Homo sapiens
ccctgggctgcattgggtt

SEQ ID NO: 16566 - DNA, 19 bp, Homo sapiens
cctgggctgcattgggttg

SEQ ID NO: 16567 - DNA, 19 bp, Homo sapiens
ctgggctgcattgggttgg

SEQ ID NO: 16568 - DNA, 19 bp, Homo sapiens
tgggctgcattgggttggt

SEQ ID NO: 16569 - DNA, 19 bp, Homo sapiens
gggctgcattgggttggtg

SEQ ID NO: 16570 - DNA, 19 bp, Homo sapiens
ggctgcattgggttggtgg

SEQ ID NO: 16571 - DNA, 19 bp, Homo sapiens
gctgcattgggttggtggc

SEQ ID NO: 16572 - DNA, 19 bp, Homo sapiens
ctgcattgggttggtggcc

SEQ ID NO: 16573 - DNA, 19 bp, Homo sapiens
tgcattgggttggtggccc

SEQ ID NO: 16574 - DNA, 19 bp, Homo sapiens
gcattgggttggtggccca

SEQ ID NO: 16575 - DNA, 19 bp, Homo sapiens
cattgggttggtggcccac

SEQ ID NO: 16576 - DNA, 19 bp, Homo sapiens
attgggttggtggcccacg

SEQ ID NO: 16577 - DNA, 19 bp, Homo sapiens
ttgggttggtggcccacgc

SEQ ID NO: 16578 - DNA, 19 bp, Homo sapiens
tgggttggtggcccacgcc

SEQ ID NO: 16579 - DNA, 19 bp, Homo sapiens
gggttggtggcccacgccg

SEQ ID NO: 16580 - DNA, 19 bp, Homo sapiens
ggttggtggcccacgccgg

SEQ ID NO: 16581 - DNA, 19 bp, Homo sapiens
gttggtggcccacgccggc

SEQ ID NO: 16582 - DNA, 19 bp, Homo sapiens
ttggtggcccacgccggcc

SEQ ID NO: 16583 - DNA, 19 bp, Homo sapiens
tggtggcccacgccggcca

SEQ ID NO: 16584 - DNA, 19 bp, Homo sapiens
ggtggcccacgccggccaa

SEQ ID NO: 16585 - DNA, 19 bp, Homo sapiens
gtggcccacgccggccaac

SEQ ID NO: 16586 - DNA, 19 bp, Homo sapiens
tggcccacgccggccaact

SEQ ID NO: 16587 - DNA, 19 bp, Homo sapiens
ggcccacgccggccaactc

SEQ ID NO: 16588 - DNA, 19 bp, Homo sapiens
gcccacgccggccaactca

SEQ ID NO: 16589 - DNA, 19 bp, Homo sapiens
cccacgccggccaactcac

SEQ ID NO: 16590 - DNA, 19 bp, Homo sapiens
ccacgccggccaactcacc

SEQ ID NO: 16591 - DNA, 19 bp, Homo sapiens
cacgccggccaactcaccg

SEQ ID NO: 16592 - DNA, 19 bp, Homo sapiens
acgccggccaactcaccgc

SEQ ID NO: 16593 - DNA, 19 bp, Homo sapiens
cgccggccaactcaccgca

SEQ ID NO: 16594 - DNA, 19 bp, Homo sapiens
gccggccaactcaccgcag

SEQ ID NO: 16595 - DNA, 19 bp, Homo sapiens
ccggccaactcaccgcagt

SEQ ID NO: 16596 - DNA, 19 bp, Homo sapiens
cggccaactcaccgcagtc

SEQ ID NO: 16597 - DNA, 19 bp, Homo sapiens
ggccaactcaccgcagtct

SEQ ID NO: 16598 - DNA, 19 bp, Homo sapiens
gccaactcaccgcagtctg

SEQ ID NO: 16599 - DNA, 19 bp, Homo sapiens
ccaactcaccgcagtctgg

SEQ ID NO: 16600 - DNA, 19 bp, Homo sapiens
caactcaccgcagtctggc

SEQ ID NO: 16601 - DNA, 19 bp, Homo sapiens
aactcaccgcagtctggcg

SEQ ID NO: 16602 - DNA, 19 bp, Homo sapiens
actcaccgcagtctggcgc

SEQ ID NO: 16603 - DNA, 19 bp, Homo sapiens
ctcaccgcagtctggcgcc

SEQ ID NO: 16604 - DNA, 19 bp, Homo sapiens
tcaccgcagtctggcgccg

SEQ ID NO: 16605 - DNA, 19 bp, Homo sapiens
caccgcagtctggcgccgc

SEQ ID NO: 16606 - DNA, 19 bp, Homo sapiens
accgcagtctggcgccgcc

SEQ ID NO: 16607 - DNA, 19 bp, Homo sapiens
ccgcagtctggcgccgccc

SEQ ID NO: 16608 - DNA, 19 bp, Homo sapiens
cgcagtctggcgccgccca

SEQ ID NO: 16609 - DNA, 19 bp, Homo sapiens
gcagtctggcgccgcccag

SEQ ID NO: 16610 - DNA, 19 bp, Homo sapiens
cagtctggcgccgcccagg

SEQ ID NO: 16611 - DNA, 19 bp, Homo sapiens
agtctggcgccgcccagga

SEQ ID NO: 16612 - DNA, 19 bp, Homo sapiens
gtctggcgccgcccaggag

SEQ ID NO: 16613 - DNA, 19 bp, Homo sapiens
tctggcgccgcccaggagc

SEQ ID NO: 16614 - DNA, 19 bp, Homo sapiens
ctggcgccgcccaggagcc

SEQ ID NO: 16615 - DNA, 19 bp, Homo sapiens
tggcgccgcccaggagccg

SEQ ID NO: 16616 - DNA, 19 bp, Homo sapiens
ggcgccgcccaggagccgc

SEQ ID NO: 16617 - DNA, 19 bp, Homo sapiens
gcgccgcccaggagccgcc

SEQ ID NO: 16618 - DNA, 19 bp, Homo sapiens
cgccgcccaggagccgccc

SEQ ID NO: 16619 - DNA, 19 bp, Homo sapiens
gccgcccaggagccgcccg

SEQ ID NO: 16620 - DNA, 19 bp, Homo sapiens
ccgcccaggagccgcccgc

SEQ ID NO: 16621 - DNA, 19 bp, Homo sapiens
cgcccaggagccgcccgcg

SEQ ID NO: 16622 - DNA, 19 bp, Homo sapiens
gcccaggagccgcccgcgc

SEQ ID NO: 16623 - DNA, 19 bp, Homo sapiens
cccaggagccgcccgcgct

SEQ ID NO: 16624 - DNA, 19 bp, Homo sapiens
ccaggagccgcccgcgctc

SEQ ID NO: 16625 - DNA, 19 bp, Homo sapiens
caggagccgcccgcgctcc

SEQ ID NO: 16626 - DNA, 19 bp, Homo sapiens
aggagccgcccgcgctccc

SEQ ID NO: 16627 - DNA, 19 bp, Homo sapiens
ggagccgcccgcgctccct

SEQ ID NO: 16628 - DNA, 19 bp, Homo sapiens
gagccgcccgcgctccctg

SEQ ID NO: 16629 - DNA, 19 bp, Homo sapiens
agccgcccgcgctccctga

SEQ ID NO: 16630 - DNA, 19 bp, Homo sapiens
gccgcccgcgctccctgaa

SEQ ID NO: 16631 - DNA, 19 bp, Homo sapiens
ccgcccgcgctccctgaac

SEQ ID NO: 16632 - DNA, 19 bp, Homo sapiens
cgcccgcgctccctgaacc

SEQ ID NO: 16633 - DNA, 19 bp, Homo sapiens
gcccgcgctccctgaaccc

SEQ ID NO: 16634 - DNA, 19 bp, Homo sapiens
cccgcgctccctgaaccct

SEQ ID NO: 16635 - DNA, 19 bp, Homo sapiens
ccgcgctccctgaacccta

SEQ ID NO: 16636 - DNA, 19 bp, Homo sapiens
cgcgctccctgaaccctag

SEQ ID NO: 16637 - DNA, 19 bp, Homo sapiens
gcgctccctgaaccctaga

SEQ ID NO: 16638 - DNA, 19 bp, Homo sapiens
cgctccctgaaccctagaa

SEQ ID NO: 16639 - DNA, 19 bp, Homo sapiens
gctccctgaaccctagaac

SEQ ID NO: 16640 - DNA, 19 bp, Homo sapiens
ctccctgaaccctagaact

SEQ ID NO: 16641 - DNA, 19 bp, Homo sapiens
tccctgaaccctagaactg

SEQ ID NO: 16642 - DNA, 19 bp, Homo sapiens
ccctgaaccctagaactgt

SEQ ID NO: 16643 - DNA, 19 bp, Homo sapiens
cctgaaccctagaactgtc

SEQ ID NO: 16644 - DNA, 19 bp, Homo sapiens
ctgaaccctagaactgtct

SEQ ID NO: 16645 - DNA, 19 bp, Homo sapiens
tgaaccctagaactgtctt

SEQ ID NO: 16646 - DNA, 19 bp, Homo sapiens
gaaccctagaactgtcttc

SEQ ID NO: 16647 - DNA, 19 bp, Homo sapiens
aaccctagaactgtcttcg

SEQ ID NO: 16648 - DNA, 19 bp, Homo sapiens
accctagaactgtcttcga

SEQ ID NO: 16649 - DNA, 19 bp, Homo sapiens
ccctagaactgtcttcgac

SEQ ID NO: 16650 - DNA, 19 bp, Homo sapiens
cctagaactgtcttcgact

SEQ ID NO: 16651 - DNA, 19 bp, Homo sapiens
ctagaactgtcttcgactc

SEQ ID NO: 16652 - DNA, 19 bp, Homo sapiens
tagaactgtcttcgactcc

SEQ ID NO: 16653 - DNA, 19 bp, Homo sapiens
agaactgtcttcgactccg

SEQ ID NO: 16654 - DNA, 19 bp, Homo sapiens
gaactgtcttcgactccgg

SEQ ID NO: 16655 - DNA, 19 bp, Homo sapiens
aactgtcttcgactccggg

SEQ ID NO: 16656 - DNA, 19 bp, Homo sapiens
actgtcttcgactccgggg

SEQ ID NO: 16657 - DNA, 19 bp, Homo sapiens
ctgtcttcgactccggggc

SEQ ID NO: 16658 - DNA, 19 bp, Homo sapiens
tgtcttcgactccggggcc

SEQ ID NO: 16659 - DNA, 19 bp, Homo sapiens
gtcttcgactccggggccc

SEQ ID NO: 16660 - DNA, 19 bp, Homo sapiens
tcttcgactccggggcccc

SEQ ID NO: 16661 - DNA, 19 bp, Homo sapiens
cttcgactccggggccccg

SEQ ID NO: 16662 - DNA, 19 bp, Homo sapiens
ttcgactccggggccccgt

SEQ ID NO: 16663 - DNA, 19 bp, Homo sapiens
tcgactccggggccccgtt

SEQ ID NO: 16664 - DNA, 19 bp, Homo sapiens
cgactccggggccccgttg

SEQ ID NO: 16665 - DNA, 19 bp, Homo sapiens
gactccggggccccgttgg

SEQ ID NO: 16666 - DNA, 19 bp, Homo sapiens
actccggggccccgttgga

SEQ ID NO: 16667 - DNA, 19 bp, Homo sapiens
ctccggggccccgttggaa

SEQ ID NO: 16668 - DNA, 19 bp, Homo sapiens
tccggggccccgttggaag

SEQ ID NO: 16669 - DNA, 19 bp, Homo sapiens
ccggggccccgttggaaga

SEQ ID NO: 16670 - DNA, 19 bp, Homo sapiens
cggggccccgttggaagac

SEQ ID NO: 16671 - DNA, 19 bp, Homo sapiens
ggggccccgttggaagact

SEQ ID NO: 16672 - DNA, 19 bp, Homo sapiens
gggccccgttggaagactg

SEQ ID NO: 16673 - DNA, 19 bp, Homo sapiens
ggccccgttggaagactga

SEQ ID NO: 16674 - DNA, 19 bp, Homo sapiens
gccccgttggaagactgag

SEQ ID NO: 16675 - DNA, 19 bp, Homo sapiens
ccccgttggaagactgagt

SEQ ID NO: 16676 - DNA, 19 bp, Homo sapiens
cccgttggaagactgagtg

SEQ ID NO: 16677 - DNA, 19 bp, Homo sapiens
ccgttggaagactgagtgc

SEQ ID NO: 16678 - DNA, 19 bp, Homo sapiens
cgttggaagactgagtgcc

SEQ ID NO: 16679 - DNA, 19 bp, Homo sapiens
gttggaagactgagtgccc

SEQ ID NO: 16680 - DNA, 19 bp, Homo sapiens
ttggaagactgagtgcccg

SEQ ID NO: 16681 - DNA, 19 bp, Homo sapiens
tggaagactgagtgcccgg

SEQ ID NO: 16682 - DNA, 19 bp, Homo sapiens
ggaagactgagtgcccggg

SEQ ID NO: 16683 - DNA, 19 bp, Homo sapiens
gaagactgagtgcccgggg

SEQ ID NO: 16684 - DNA, 19 bp, Homo sapiens
aagactgagtgcccggggc

SEQ ID NO: 16685 - DNA, 19 bp, Homo sapiens
agactgagtgcccggggca

SEQ ID NO: 16686 - DNA, 19 bp, Homo sapiens
gactgagtgcccggggcac

SEQ ID NO: 16687 - DNA, 19 bp, Homo sapiens
actgagtgcccggggcacg

SEQ ID NO: 16688 - DNA, 19 bp, Homo sapiens
ctgagtgcccggggcacgg

SEQ ID NO: 16689 - DNA, 19 bp, Homo sapiens
tgagtgcccggggcacggc

SEQ ID NO: 16690 - DNA, 19 bp, Homo sapiens
gagtgcccggggcacggca

SEQ ID NO: 16691 - DNA, 19 bp, Homo sapiens
agtgcccggggcacggcac

SEQ ID NO: 16692 - DNA, 19 bp, Homo sapiens
gtgcccggggcacggcaca

SEQ ID NO: 16693 - DNA, 19 bp, Homo sapiens
tgcccggggcacggcacag

SEQ ID NO: 16694 - DNA, 19 bp, Homo sapiens
gcccggggcacggcacaga

SEQ ID NO: 16695 - DNA, 19 bp, Homo sapiens
cccggggcacggcacagaa

SEQ ID NO: 16696 - DNA, 19 bp, Homo sapiens
ccggggcacggcacagaag

SEQ ID NO: 16697 - DNA, 19 bp, Homo sapiens
cggggcacggcacagaagc

SEQ ID NO: 16698 - DNA, 19 bp, Homo sapiens
ggggcacggcacagaagcc

SEQ ID NO: 16699 - DNA, 19 bp, Homo sapiens
gggcacggcacagaagccg

SEQ ID NO: 16700 - DNA, 19 bp, Homo sapiens
ggcacggcacagaagccgc

SEQ ID NO: 16701 - DNA, 19 bp, Homo sapiens
gcacggcacagaagccgcg

SEQ ID NO: 16702 - DNA, 19 bp, Homo sapiens
cacggcacagaagccgcgc

SEQ ID NO: 16703 - DNA, 19 bp, Homo sapiens
acggcacagaagccgcgcc

SEQ ID NO: 16704 - DNA, 19 bp, Homo sapiens
cggcacagaagccgcgccc

SEQ ID NO: 16705 - DNA, 19 bp, Homo sapiens
ggcacagaagccgcgccca

SEQ ID NO: 16706 - DNA, 19 bp, Homo sapiens
gcacagaagccgcgcccac

SEQ ID NO: 16707 - DNA, 19 bp, Homo sapiens
cacagaagccgcgcccacc

SEQ ID NO: 16708 - DNA, 19 bp, Homo sapiens
acagaagccgcgcccaccg

SEQ ID NO: 16709 - DNA, 19 bp, Homo sapiens
cagaagccgcgcccaccgc

SEQ ID NO: 16710 - DNA, 19 bp, Homo sapiens
agaagccgcgcccaccgcc

SEQ ID NO: 16711 - DNA, 19 bp, Homo sapiens
gaagccgcgcccaccgcct

SEQ ID NO: 16712 - DNA, 19 bp, Homo sapiens
aagccgcgcccaccgcctg

SEQ ID NO: 16713 - DNA, 19 bp, Homo sapiens
agccgcgcccaccgcctgc

SEQ ID NO: 16714 - DNA, 19 bp, Homo sapiens
gccgcgcccaccgcctgcc

SEQ ID NO: 16715 - DNA, 19 bp, Homo sapiens
ccgcgcccaccgcctgcca

SEQ ID NO: 16716 - DNA, 19 bp, Homo sapiens
cgcgcccaccgcctgccag

SEQ ID NO: 16717 - DNA, 19 bp, Homo sapiens
gcgcccaccgcctgccagt

SEQ ID NO: 16718 - DNA, 19 bp, Homo sapiens
cgcccaccgcctgccagtt

SEQ ID NO: 16719 - DNA, 19 bp, Homo sapiens
gcccaccgcctgccagttc

SEQ ID NO: 16720 - DNA, 19 bp, Homo sapiens
cccaccgcctgccagttca

SEQ ID NO: 16721 - DNA, 19 bp, Homo sapiens
ccaccgcctgccagttcac

SEQ ID NO: 16722 - DNA, 19 bp, Homo sapiens
caccgcctgccagttcaca

SEQ ID NO: 16723 - DNA, 19 bp, Homo sapiens
accgcctgccagttcacaa

SEQ ID NO: 16724 - DNA, 19 bp, Homo sapiens
ccgcctgccagttcacaac

SEQ ID NO: 16725 - DNA, 19 bp, Homo sapiens
cgcctgccagttcacaacc

SEQ ID NO: 16726 - DNA, 19 bp, Homo sapiens
gcctgccagttcacaaccg

SEQ ID NO: 16727 - DNA, 19 bp, Homo sapiens
cctgccagttcacaaccgc

SEQ ID NO: 16728 - DNA, 19 bp, Homo sapiens
ctgccagttcacaaccgct

SEQ ID NO: 16729 - DNA, 19 bp, Homo sapiens
tgccagttcacaaccgctc

SEQ ID NO: 16730 - DNA, 19 bp, Homo sapiens
gccagttcacaaccgctcc

SEQ ID NO: 16731 - DNA, 19 bp, Homo sapiens
ccagttcacaaccgctccg

SEQ ID NO: 16732 - DNA, 19 bp, Homo sapiens
cagttcacaaccgctccga

SEQ ID NO: 16733 - DNA, 19 bp, Homo sapiens
agttcacaaccgctccgag

SEQ ID NO: 16734 - DNA, 19 bp, Homo sapiens
gttcacaaccgctccgagc

SEQ ID NO: 16735 - DNA, 19 bp, Homo sapiens
ttcacaaccgctccgagcg

SEQ ID NO: 16736 - DNA, 19 bp, Homo sapiens
tcacaaccgctccgagcgt

SEQ ID NO: 16737 - DNA, 19 bp, Homo sapiens
cacaaccgctccgagcgtg

SEQ ID NO: 16738 - DNA, 19 bp, Homo sapiens
acaaccgctccgagcgtgg

SEQ ID NO: 16739 - DNA, 19 bp, Homo sapiens
caaccgctccgagcgtggg

SEQ ID NO: 16740 - DNA, 19 bp, Homo sapiens
aaccgctccgagcgtgggt

SEQ ID NO: 16741 - DNA, 19 bp, Homo sapiens
accgctccgagcgtgggtc

SEQ ID NO: 16742 - DNA, 19 bp, Homo sapiens
ccgctccgagcgtgggtct

SEQ ID NO: 16743 - DNA, 19 bp, Homo sapiens
cgctccgagcgtgggtctc

SEQ ID NO: 16744 - DNA, 19 bp, Homo sapiens
gctccgagcgtgggtctcc

SEQ ID NO: 16745 - DNA, 19 bp, Homo sapiens
ctccgagcgtgggtctccg

SEQ ID NO: 16746 - DNA, 19 bp, Homo sapiens
tccgagcgtgggtctccgc

SEQ ID NO: 16747 - DNA, 19 bp, Homo sapiens
ccgagcgtgggtctccgcc

SEQ ID NO: 16748 - DNA, 19 bp, Homo sapiens
cgagcgtgggtctccgccc

SEQ ID NO: 16749 - DNA, 19 bp, Homo sapiens
gagcgtgggtctccgccca

SEQ ID NO: 16750 - DNA, 19 bp, Homo sapiens
agcgtgggtctccgcccag

SEQ ID NO: 16751 - DNA, 19 bp, Homo sapiens
gcgtgggtctccgcccagc

SEQ ID NO: 16752 - DNA, 19 bp, Homo sapiens
cgtgggtctccgcccagct

SEQ ID NO: 16753 - DNA, 19 bp, Homo sapiens
gtgggtctccgcccagctc

SEQ ID NO: 16754 - DNA, 19 bp, Homo sapiens
tgggtctccgcccagctcc

SEQ ID NO: 16755 - DNA, 19 bp, Homo sapiens
gggtctccgcccagctcca

SEQ ID NO: 16756 - DNA, 19 bp, Homo sapiens
ggtctccgcccagctccag

SEQ ID NO: 16757 - DNA, 19 bp, Homo sapiens
gtctccgcccagctccagt

SEQ ID NO: 16758 - DNA, 19 bp, Homo sapiens
tctccgcccagctccagtc

SEQ ID NO: 16759 - DNA, 19 bp, Homo sapiens
ctccgcccagctccagtcc

SEQ ID NO: 16760 - DNA, 19 bp, Homo sapiens
tccgcccagctccagtcct

SEQ ID NO: 16761 - DNA, 19 bp, Homo sapiens
ccgcccagctccagtcctg

SEQ ID NO: 16762 - DNA, 19 bp, Homo sapiens
cgcccagctccagtcctgt

SEQ ID NO: 16763 - DNA, 19 bp, Homo sapiens
gcccagctccagtcctgtg

SEQ ID NO: 16764 - DNA, 19 bp, Homo sapiens
cccagctccagtcctgtga

SEQ ID NO: 16765 - DNA, 19 bp, Homo sapiens
ccagctccagtcctgtgat

SEQ ID NO: 16766 - DNA, 19 bp, Homo sapiens
cagctccagtcctgtgatc

SEQ ID NO: 16767 - DNA, 19 bp, Homo sapiens
agctccagtcctgtgatcc

SEQ ID NO: 16768 - DNA, 19 bp, Homo sapiens
gctccagtcctgtgatccg

SEQ ID NO: 16769 - DNA, 19 bp, Homo sapiens
ctccagtcctgtgatccgg

SEQ ID NO: 16770 - DNA, 19 bp, Homo sapiens
tccagtcctgtgatccggg

SEQ ID NO: 16771 - DNA, 19 bp, Homo sapiens
ccagtcctgtgatccgggc

SEQ ID NO: 16772 - DNA, 19 bp, Homo sapiens
cagtcctgtgatccgggcc

SEQ ID NO: 16773 - DNA, 19 bp, Homo sapiens
agtcctgtgatccgggccc

SEQ ID NO: 16774 - DNA, 19 bp, Homo sapiens
gtcctgtgatccgggcccg

SEQ ID NO: 16775 - DNA, 19 bp, Homo sapiens
tcctgtgatccgggcccgc

SEQ ID NO: 16776 - DNA, 19 bp, Homo sapiens
cctgtgatccgggcccgcc

SEQ ID NO: 16777 - DNA, 19 bp, Homo sapiens
ctgtgatccgggcccgccc

SEQ ID NO: 16778 - DNA, 19 bp, Homo sapiens
tgtgatccgggcccgcccc

SEQ ID NO: 16779 - DNA, 19 bp, Homo sapiens
gtgatccgggcccgccccc

SEQ ID NO: 16780 - DNA, 19 bp, Homo sapiens
tgatccgggcccgccccct

SEQ ID NO: 16781 - DNA, 19 bp, Homo sapiens
gatccgggcccgcccccta

SEQ ID NO: 16782 - DNA, 19 bp, Homo sapiens
atccgggcccgccccctag

SEQ ID NO: 16783 - DNA, 19 bp, Homo sapiens
tccgggcccgccccctagc

SEQ ID NO: 16784 - DNA, 19 bp, Homo sapiens
ccgggcccgccccctagcg

SEQ ID NO: 16785 - DNA, 19 bp, Homo sapiens
cgggcccgccccctagcgg

SEQ ID NO: 16786 - DNA, 19 bp, Homo sapiens
gggcccgccccctagcggc

SEQ ID NO: 16787 - DNA, 19 bp, Homo sapiens
ggcccgccccctagcggcc

SEQ ID NO: 16788 - DNA, 19 bp, Homo sapiens
gcccgccccctagcggccg

SEQ ID NO: 16789 - DNA, 19 bp, Homo sapiens
cccgccccctagcggccgg

SEQ ID NO: 16790 - DNA, 19 bp, Homo sapiens
ccgccccctagcggccggg

SEQ ID NO: 16791 - DNA, 19 bp, Homo sapiens
cgccccctagcggccgggg

SEQ ID NO: 16792 - DNA, 19 bp, Homo sapiens
gccccctagcggccgggga

SEQ ID NO: 16793 - DNA, 19 bp, Homo sapiens
ccccctagcggccggggag

SEQ ID NO: 16794 - DNA, 19 bp, Homo sapiens
cccctagcggccggggagg

SEQ ID NO: 16795 - DNA, 19 bp, Homo sapiens
ccctagcggccggggaggg

SEQ ID NO: 16796 - DNA, 19 bp, Homo sapiens
cctagcggccggggaggga

SEQ ID NO: 16797 - DNA, 19 bp, Homo sapiens
ctagcggccggggagggag

SEQ ID NO: 16798 - DNA, 19 bp, Homo sapiens
tagcggccggggagggagg

SEQ ID NO: 16799 - DNA, 19 bp, Homo sapiens
agcggccggggagggaggg

SEQ ID NO: 16800 - DNA, 19 bp, Homo sapiens
gcggccggggagggagggg

SEQ ID NO: 16801 - DNA, 19 bp, Homo sapiens
cggccggggagggaggggc

SEQ ID NO: 16802 - DNA, 19 bp, Homo sapiens
ggccggggagggaggggcc

SEQ ID NO: 16803 - DNA, 19 bp, Homo sapiens
gccggggagggaggggccg

SEQ ID NO: 16804 - DNA, 19 bp, Homo sapiens
ccggggagggaggggccgg

SEQ ID NO: 16805 - DNA, 19 bp, Homo sapiens
cggggagggaggggccggg

SEQ ID NO: 16806 - DNA, 19 bp, Homo sapiens
ggggagggaggggccgggt

SEQ ID NO: 16807 - DNA, 19 bp, Homo sapiens
gggagggaggggccgggtc

SEQ ID NO: 16808 - DNA, 19 bp, Homo sapiens
ggagggaggggccgggtcc

SEQ ID NO: 16809 - DNA, 19 bp, Homo sapiens
gagggaggggccgggtccg

SEQ ID NO: 16810 - DNA, 19 bp, Homo sapiens
agggaggggccgggtccgc

SEQ ID NO: 16811 - DNA, 19 bp, Homo sapiens
gggaggggccgggtccgcg

SEQ ID NO: 16812 - DNA, 19 bp, Homo sapiens
ggaggggccgggtccgcgg

SEQ ID NO: 16813 - DNA, 19 bp, Homo sapiens
gaggggccgggtccgcggc

SEQ ID NO: 16814 - DNA, 19 bp, Homo sapiens
aggggccgggtccgcggcc

SEQ ID NO: 16815 - DNA, 19 bp, Homo sapiens
ggggccgggtccgcggccg

SEQ ID NO: 16816 - DNA, 19 bp, Homo sapiens
gggccgggtccgcggccgg

SEQ ID NO: 16817 - DNA, 19 bp, Homo sapiens
ggccgggtccgcggccggc

SEQ ID NO: 16818 - DNA, 19 bp, Homo sapiens
gccgggtccgcggccggcg

SEQ ID NO: 16819 - DNA, 19 bp, Homo sapiens
ccgggtccgcggccggcga

SEQ ID NO: 16820 - DNA, 19 bp, Homo sapiens
cgggtccgcggccggcgaa

SEQ ID NO: 16821 - DNA, 19 bp, Homo sapiens
gggtccgcggccggcgaac

SEQ ID NO: 16822 - DNA, 19 bp, Homo sapiens
ggtccgcggccggcgaacg

SEQ ID NO: 16823 - DNA, 19 bp, Homo sapiens
gtccgcggccggcgaacgg

SEQ ID NO: 16824 - DNA, 19 bp, Homo sapiens
tccgcggccggcgaacggg

SEQ ID NO: 16825 - DNA, 19 bp, Homo sapiens
ccgcggccggcgaacgggg

SEQ ID NO: 16826 - DNA, 19 bp, Homo sapiens
cgcggccggcgaacggggc

SEQ ID NO: 16827 - DNA, 19 bp, Homo sapiens
gcggccggcgaacggggct

SEQ ID NO: 16828 - DNA, 19 bp, Homo sapiens
cggccggcgaacggggctc

SEQ ID NO: 16829 - DNA, 19 bp, Homo sapiens
ggccggcgaacggggctcg

SEQ ID NO: 16830 - DNA, 19 bp, Homo sapiens
gccggcgaacggggctcga

SEQ ID NO: 16831 - DNA, 19 bp, Homo sapiens
ccggcgaacggggctcgaa

SEQ ID NO: 16832 - DNA, 19 bp, Homo sapiens
cggcgaacggggctcgaag

SEQ ID NO: 16833 - DNA, 19 bp, Homo sapiens
ggcgaacggggctcgaagg

SEQ ID NO: 16834 - DNA, 19 bp, Homo sapiens
gcgaacggggctcgaaggg

SEQ ID NO: 16835 - DNA, 19 bp, Homo sapiens
cgaacggggctcgaagggt

SEQ ID NO: 16836 - DNA, 19 bp, Homo sapiens
gaacggggctcgaagggtc

SEQ ID NO: 16837 - DNA, 19 bp, Homo sapiens
aacggggctcgaagggtcc

SEQ ID NO: 16838 - DNA, 19 bp, Homo sapiens
acggggctcgaagggtcct

SEQ ID NO: 16839 - DNA, 19 bp, Homo sapiens
cggggctcgaagggtcctt

SEQ ID NO: 16840 - DNA, 19 bp, Homo sapiens
ggggctcgaagggtccttg

SEQ ID NO: 16841 - DNA, 19 bp, Homo sapiens
gggctcgaagggtccttgt

SEQ ID NO: 16842 - DNA, 19 bp, Homo sapiens
ggctcgaagggtccttgta

SEQ ID NO: 16843 - DNA, 19 bp, Homo sapiens
gctcgaagggtccttgtag

SEQ ID NO: 16844 - DNA, 19 bp, Homo sapiens
ctcgaagggtccttgtagc

SEQ ID NO: 16845 - DNA, 19 bp, Homo sapiens
tcgaagggtccttgtagcc

SEQ ID NO: 16846 - DNA, 19 bp, Homo sapiens
cgaagggtccttgtagccg

SEQ ID NO: 16847 - DNA, 19 bp, Homo sapiens
gaagggtccttgtagccgg

SEQ ID NO: 16848 - DNA, 19 bp, Homo sapiens
aagggtccttgtagccggg

SEQ ID NO: 16849 - DNA, 19 bp, Homo sapiens
agggtccttgtagccggga

SEQ ID NO: 16850 - DNA, 19 bp, Homo sapiens
gggtccttgtagccgggaa

SEQ ID NO: 16851 - DNA, 19 bp, Homo sapiens
ggtccttgtagccgggaat

SEQ ID NO: 16852 - DNA, 19 bp, Homo sapiens
gtccttgtagccgggaatg

SEQ ID NO: 16853 - DNA, 19 bp, Homo sapiens
tccttgtagccgggaatgc

SEQ ID NO: 16854 - DNA, 19 bp, Homo sapiens
ccttgtagccgggaatgct

SEQ ID NO: 16855 - DNA, 19 bp, Homo sapiens
cttgtagccgggaatgctg

SEQ ID NO: 16856 - DNA, 19 bp, Homo sapiens
ttgtagccgggaatgctgc

SEQ ID NO: 16857 - DNA, 19 bp, Homo sapiens
tgtagccgggaatgctgct

SEQ ID NO: 16858 - DNA, 19 bp, Homo sapiens
gtagccgggaatgctgctg

SEQ ID NO: 16859 - DNA, 19 bp, Homo sapiens
tagccgggaatgctgctgc

SEQ ID NO: 16860 - DNA, 19 bp, Homo sapiens
agccgggaatgctgctgct

SEQ ID NO: 16861 - DNA, 19 bp, Homo sapiens
gccgggaatgctgctgctg

SEQ ID NO: 16862 - DNA, 19 bp, Homo sapiens
ccgggaatgctgctgctgc

SEQ ID NO: 16863 - DNA, 19 bp, Homo sapiens
cgggaatgctgctgctgct

SEQ ID NO: 16864 - DNA, 19 bp, Homo sapiens
gggaatgctgctgctgctg

SEQ ID NO: 16865 - DNA, 19 bp, Homo sapiens
ggaatgctgctgctgctgc

SEQ ID NO: 16866 - DNA, 19 bp, Homo sapiens
gaatgctgctgctgctgct

SEQ ID NO: 16867 - DNA, 19 bp, Homo sapiens
aatgctgctgctgctgctg

SEQ ID NO: 16868 - DNA, 19 bp, Homo sapiens
atgctgctgctgctgctgc

SEQ ID NO: 16869 - DNA, 19 bp, Homo sapiens
gctgctgctgctgctgctg

SEQ ID NO: 16870 - DNA, 19 bp, Homo sapiens
ctgctgctgctgctgctgc

SEQ ID NO: 16871 - DNA, 19 bp, Homo sapiens
ctgctgctgctgctgctgg

SEQ ID NO: 16872 - DNA, 19 bp, Homo sapiens
tgctgctgctgctgctggg

SEQ ID NO: 16873 - DNA, 19 bp, Homo sapiens
gctgctgctgctgctgggg

SEQ ID NO: 16874 - DNA, 19 bp, Homo sapiens
ctgctgctgctgctggggg

SEQ ID NO: 16875 - DNA, 19 bp, Homo sapiens
tgctgctgctgctgggggg

SEQ ID NO: 16876 - DNA, 19 bp, Homo sapiens
gctgctgctgctgggggga

SEQ ID NO: 16877 - DNA, 19 bp, Homo sapiens
ctgctgctgctggggggat

SEQ ID NO: 16878 - DNA, 19 bp, Homo sapiens
tgctgctgctggggggatc

SEQ ID NO: 16879 - DNA, 19 bp, Homo sapiens
gctgctgctggggggatca

SEQ ID NO: 16880 - DNA, 19 bp, Homo sapiens
ctgctgctggggggatcac

SEQ ID NO: 16881 - DNA, 19 bp, Homo sapiens
tgctgctggggggatcaca

SEQ ID NO: 16882 - DNA, 19 bp, Homo sapiens
gctgctggggggatcacag

SEQ ID NO: 16883 - DNA, 19 bp, Homo sapiens
ctgctggggggatcacaga

SEQ ID NO: 16884 - DNA, 19 bp, Homo sapiens
tgctggggggatcacagac

SEQ ID NO: 16885 - DNA, 19 bp, Homo sapiens
gctggggggatcacagacc

SEQ ID NO: 16886 - DNA, 19 bp, Homo sapiens
ctggggggatcacagacca

SEQ ID NO: 16887 - DNA, 19 bp, Homo sapiens
tggggggatcacagaccat

SEQ ID NO: 16888 - DNA, 19 bp, Homo sapiens
ggggggatcacagaccatt

SEQ ID NO: 16889 - DNA, 19 bp, Homo sapiens
gggggatcacagaccattt

SEQ ID NO: 16890 - DNA, 19 bp, Homo sapiens
ggggatcacagaccatttc

SEQ ID NO: 16891 - DNA, 19 bp, Homo sapiens
gggatcacagaccatttct

SEQ ID NO: 16892 - DNA, 19 bp, Homo sapiens
ggatcacagaccatttctt

SEQ ID NO: 16893 - DNA, 19 bp, Homo sapiens
gatcacagaccatttcttt

SEQ ID NO: 16894 - DNA, 19 bp, Homo sapiens
atcacagaccatttctttc

SEQ ID NO: 16895 - DNA, 19 bp, Homo sapiens
tcacagaccatttctttct

SEQ ID NO: 16896 - DNA, 19 bp, Homo sapiens
cacagaccatttctttctt

SEQ ID NO: 16897 - DNA, 19 bp, Homo sapiens
acagaccatttctttcttt

SEQ ID NO: 16898 - DNA, 19 bp, Homo sapiens
cagaccatttctttctttc

SEQ ID NO: 16899 - DNA, 19 bp, Homo sapiens
agaccatttctttctttcg

SEQ ID NO: 16900 - DNA, 19 bp, Homo sapiens
gaccatttctttctttcgg

SEQ ID NO: 16901 - DNA, 19 bp, Homo sapiens
accatttctttctttcggc

SEQ ID NO: 16902 - DNA, 19 bp, Homo sapiens
ccatttctttctttcggcc

SEQ ID NO: 16903 - DNA, 19 bp, Homo sapiens
catttctttctttcggcca

SEQ ID NO: 16904 - DNA, 19 bp, Homo sapiens
atttctttctttcggccag

SEQ ID NO: 16905 - DNA, 19 bp, Homo sapiens
tttctttctttcggccagg

SEQ ID NO: 16906 - DNA, 19 bp, Homo sapiens
ttctttctttcggccaggc

SEQ ID NO: 16907 - DNA, 19 bp, Homo sapiens
tctttctttcggccaggct

SEQ ID NO: 16908 - DNA, 19 bp, Homo sapiens
ctttctttcggccaggctg

SEQ ID NO: 16909 - DNA, 19 bp, Homo sapiens
tttctttcggccaggctga

SEQ ID NO: 16910 - DNA, 19 bp, Homo sapiens
ttctttcggccaggctgag

SEQ ID NO: 16911 - DNA, 19 bp, Homo sapiens
tctttcggccaggctgagg

SEQ ID NO: 16912 - DNA, 19 bp, Homo sapiens
ctttcggccaggctgaggc

SEQ ID NO: 16913 - DNA, 19 bp, Homo sapiens
tttcggccaggctgaggcc

SEQ ID NO: 16914 - DNA, 19 bp, Homo sapiens
ttcggccaggctgaggccc

SEQ ID NO: 16915 - DNA, 19 bp, Homo sapiens
tcggccaggctgaggccct

SEQ ID NO: 16916 - DNA, 19 bp, Homo sapiens
cggccaggctgaggccctg

SEQ ID NO: 16917 - DNA, 19 bp, Homo sapiens
ggccaggctgaggccctga

SEQ ID NO: 16918 - DNA, 19 bp, Homo sapiens
gccaggctgaggccctgac

SEQ ID NO: 16919 - DNA, 19 bp, Homo sapiens
ccaggctgaggccctgacg

SEQ ID NO: 16920 - DNA, 19 bp, Homo sapiens
caggctgaggccctgacgt

SEQ ID NO: 16921 - DNA, 19 bp, Homo sapiens
aggctgaggccctgacgtg

SEQ ID NO: 16922 - DNA, 19 bp, Homo sapiens
ggctgaggccctgacgtgg

SEQ ID NO: 16923 - DNA, 19 bp, Homo sapiens
gctgaggccctgacgtgga

SEQ ID NO: 16924 - DNA, 19 bp, Homo sapiens
ctgaggccctgacgtggat

SEQ ID NO: 16925 - DNA, 19 bp, Homo sapiens
tgaggccctgacgtggatg

SEQ ID NO: 16926 - DNA, 19 bp, Homo sapiens
gaggccctgacgtggatgg

SEQ ID NO: 16927 - DNA, 19 bp, Homo sapiens
aggccctgacgtggatggg

SEQ ID NO: 16928 - DNA, 19 bp, Homo sapiens
ggccctgacgtggatgggc

SEQ ID NO: 16929 - DNA, 19 bp, Homo sapiens
gccctgacgtggatgggca

SEQ ID NO: 16930 - DNA, 19 bp, Homo sapiens
ccctgacgtggatgggcaa

SEQ ID NO: 16931 - DNA, 19 bp, Homo sapiens
cctgacgtggatgggcaaa

SEQ ID NO: 16932 - DNA, 19 bp, Homo sapiens
ctgacgtggatgggcaaac

SEQ ID NO: 16933 - DNA, 19 bp, Homo sapiens
tgacgtggatgggcaaact

SEQ ID NO: 16934 - DNA, 19 bp, Homo sapiens
gacgtggatgggcaaactg

SEQ ID NO: 16935 - DNA, 19 bp, Homo sapiens
acgtggatgggcaaactgc

SEQ ID NO: 16936 - DNA, 19 bp, Homo sapiens
cgtggatgggcaaactgca

SEQ ID NO: 16937 - DNA, 19 bp, Homo sapiens
gtggatgggcaaactgcag

SEQ ID NO: 16938 - DNA, 19 bp, Homo sapiens
tggatgggcaaactgcagg

SEQ ID NO: 16939 - DNA, 19 bp, Homo sapiens
ggatgggcaaactgcaggc

SEQ ID NO: 16940 - DNA, 19 bp, Homo sapiens
gatgggcaaactgcaggcc

SEQ ID NO: 16941 - DNA, 19 bp, Homo sapiens
atgggcaaactgcaggcct

SEQ ID NO: 16942 - DNA, 19 bp, Homo sapiens
tgggcaaactgcaggcctg

SEQ ID NO: 16943 - DNA, 19 bp, Homo sapiens
gggcaaactgcaggcctgg

SEQ ID NO: 16944 - DNA, 19 bp, Homo sapiens
ggcaaactgcaggcctggg

SEQ ID NO: 16945 - DNA, 19 bp, Homo sapiens
gcaaactgcaggcctggga

SEQ ID NO: 16946 - DNA, 19 bp, Homo sapiens
caaactgcaggcctgggaa

SEQ ID NO: 16947 - DNA, 19 bp, Homo sapiens
aaactgcaggcctgggaag

SEQ ID NO: 16948 - DNA, 19 bp, Homo sapiens
aactgcaggcctgggaagg

SEQ ID NO: 16949 - DNA, 19 bp, Homo sapiens
actgcaggcctgggaaggc

SEQ ID NO: 16950 - DNA, 19 bp, Homo sapiens
ctgcaggcctgggaaggca

SEQ ID NO: 16951 - DNA, 19 bp, Homo sapiens
tgcaggcctgggaaggcag

SEQ ID NO: 16952 - DNA, 19 bp, Homo sapiens
gcaggcctgggaaggcagc

SEQ ID NO: 16953 - DNA, 19 bp, Homo sapiens
caggcctgggaaggcagca

SEQ ID NO: 16954 - DNA, 19 bp, Homo sapiens
aggcctgggaaggcagcaa

SEQ ID NO: 16955 - DNA, 19 bp, Homo sapiens
ggcctgggaaggcagcaag

SEQ ID NO: 16956 - DNA, 19 bp, Homo sapiens
gcctgggaaggcagcaagc

SEQ ID NO: 16957 - DNA, 19 bp, Homo sapiens
cctgggaaggcagcaagcc

SEQ ID NO: 16958 - DNA, 19 bp, Homo sapiens
ctgggaaggcagcaagccg

SEQ ID NO: 16959 - DNA, 19 bp, Homo sapiens
tgggaaggcagcaagccgg

SEQ ID NO: 16960 - DNA, 19 bp, Homo sapiens
gggaaggcagcaagccggg

SEQ ID NO: 16961 - DNA, 19 bp, Homo sapiens
ggaaggcagcaagccgggc

SEQ ID NO: 16962 - DNA, 19 bp, Homo sapiens
gaaggcagcaagccgggcc

SEQ ID NO: 16963 - DNA, 19 bp, Homo sapiens
aaggcagcaagccgggccg

SEQ ID NO: 16964 - DNA, 19 bp, Homo sapiens
aggcagcaagccgggccgt

SEQ ID NO: 16965 - DNA, 19 bp, Homo sapiens
ggcagcaagccgggccgtc

SEQ ID NO: 16966 - DNA, 19 bp, Homo sapiens
gcagcaagccgggccgtcc

SEQ ID NO: 16967 - DNA, 19 bp, Homo sapiens
cagcaagccgggccgtccg

SEQ ID NO: 16968 - DNA, 19 bp, Homo sapiens
agcaagccgggccgtccgt

SEQ ID NO: 16969 - DNA, 19 bp, Homo sapiens
gcaagccgggccgtccgtg

SEQ ID NO: 16970 - DNA, 19 bp, Homo sapiens
caagccgggccgtccgtgt

SEQ ID NO: 16971 - DNA, 19 bp, Homo sapiens
aagccgggccgtccgtgtt

SEQ ID NO: 16972 - DNA, 19 bp, Homo sapiens
agccgggccgtccgtgttc

SEQ ID NO: 16973 - DNA, 19 bp, Homo sapiens
gccgggccgtccgtgttcc

SEQ ID NO: 16974 - DNA, 19 bp, Homo sapiens
ccgggccgtccgtgttcca

SEQ ID NO: 16975 - DNA, 19 bp, Homo sapiens
cgggccgtccgtgttccat

SEQ ID NO: 16976 - DNA, 19 bp, Homo sapiens
gggccgtccgtgttccatc

SEQ ID NO: 16977 - DNA, 19 bp, Homo sapiens
ggccgtccgtgttccatcc

SEQ ID NO: 16978 - DNA, 19 bp, Homo sapiens
gccgtccgtgttccatcct

SEQ ID NO: 16979 - DNA, 19 bp, Homo sapiens
ccgtccgtgttccatcctc

SEQ ID NO: 16980 - DNA, 19 bp, Homo sapiens
cgtccgtgttccatcctcc

SEQ ID NO: 16981 - DNA, 19 bp, Homo sapiens
gtccgtgttccatcctcca

SEQ ID NO: 16982 - DNA, 19 bp, Homo sapiens
tccgtgttccatcctccac

SEQ ID NO: 16983 - DNA, 19 bp, Homo sapiens
ccgtgttccatcctccacg

SEQ ID NO: 16984 - DNA, 19 bp, Homo sapiens
cgtgttccatcctccacgc

SEQ ID NO: 16985 - DNA, 19 bp, Homo sapiens
gtgttccatcctccacgca

SEQ ID NO: 16986 - DNA, 19 bp, Homo sapiens
tgttccatcctccacgcac

SEQ ID NO: 16987 - DNA, 19 bp, Homo sapiens
gttccatcctccacgcacc

SEQ ID NO: 16988 - DNA, 19 bp, Homo sapiens
ttccatcctccacgcaccc

SEQ ID NO: 16989 - DNA, 19 bp, Homo sapiens
tccatcctccacgcacccc

SEQ ID NO: 16990 - DNA, 19 bp, Homo sapiens
ccatcctccacgcaccccc

SEQ ID NO: 16991 - DNA, 19 bp, Homo sapiens
catcctccacgcaccccca

SEQ ID NO: 16992 - DNA, 19 bp, Homo sapiens
atcctccacgcacccccac

SEQ ID NO: 16993 - DNA, 19 bp, Homo sapiens
tcctccacgcacccccacc

SEQ ID NO: 16994 - DNA, 19 bp, Homo sapiens
cctccacgcacccccacct

SEQ ID NO: 16995 - DNA, 19 bp, Homo sapiens
ctccacgcacccccaccta

SEQ ID NO: 16996 - DNA, 19 bp, Homo sapiens
tccacgcacccccacctat

SEQ ID NO: 16997 - DNA, 19 bp, Homo sapiens
ccacgcacccccacctatc

SEQ ID NO: 16998 - DNA, 19 bp, Homo sapiens
cacgcacccccacctatcg

SEQ ID NO: 16999 - DNA, 19 bp, Homo sapiens
acgcacccccacctatcgt

SEQ ID NO: 17000 - DNA, 19 bp, Homo sapiens
cgcacccccacctatcgtt

SEQ ID NO: 17001 - DNA, 19 bp, Homo sapiens
gcacccccacctatcgttg

SEQ ID NO: 17002 - DNA, 19 bp, Homo sapiens
cacccccacctatcgttgg

SEQ ID NO: 17003 - DNA, 19 bp, Homo sapiens
acccccacctatcgttggt

SEQ ID NO: 17004 - DNA, 19 bp, Homo sapiens
cccccacctatcgttggtt

SEQ ID NO: 17005 - DNA, 19 bp, Homo sapiens
ccccacctatcgttggttc

SEQ ID NO: 17006 - DNA, 19 bp, Homo sapiens
cccacctatcgttggttcg

SEQ ID NO: 17007 - DNA, 19 bp, Homo sapiens
ccacctatcgttggttcgc

SEQ ID NO: 17008 - DNA, 19 bp, Homo sapiens
cacctatcgttggttcgca

SEQ ID NO: 17009 - DNA, 19 bp, Homo sapiens
acctatcgttggttcgcaa

SEQ ID NO: 17010 - DNA, 19 bp, Homo sapiens
cctatcgttggttcgcaaa

SEQ ID NO: 17011 - DNA, 19 bp, Homo sapiens
ctatcgttggttcgcaaag

SEQ ID NO: 17012 - DNA, 19 bp, Homo sapiens
tatcgttggttcgcaaagt

SEQ ID NO: 17013 - DNA, 19 bp, Homo sapiens
atcgttggttcgcaaagtg

SEQ ID NO: 17014 - DNA, 19 bp, Homo sapiens
tcgttggttcgcaaagtgc

SEQ ID NO: 17015 - DNA, 19 bp, Homo sapiens
cgttggttcgcaaagtgca

SEQ ID NO: 17016 - DNA, 19 bp, Homo sapiens
gttggttcgcaaagtgcaa

SEQ ID NO: 17017 - DNA, 19 bp, Homo sapiens
ttggttcgcaaagtgcaaa

SEQ ID NO: 17018 - DNA, 19 bp, Homo sapiens
tggttcgcaaagtgcaaag

SEQ ID NO: 17019 - DNA, 19 bp, Homo sapiens
ggttcgcaaagtgcaaagc

SEQ ID NO: 17020 - DNA, 19 bp, Homo sapiens
gttcgcaaagtgcaaagct

SEQ ID NO: 17021 - DNA, 19 bp, Homo sapiens
ttcgcaaagtgcaaagctt

SEQ ID NO: 17022 - DNA, 19 bp, Homo sapiens
tcgcaaagtgcaaagcttt

SEQ ID NO: 17023 - DNA, 19 bp, Homo sapiens
cgcaaagtgcaaagctttc

SEQ ID NO: 17024 - DNA, 19 bp, Homo sapiens
gcaaagtgcaaagctttct

SEQ ID NO: 17025 - DNA, 19 bp, Homo sapiens
caaagtgcaaagctttctt

SEQ ID NO: 17026 - DNA, 19 bp, Homo sapiens
aaagtgcaaagctttcttg

SEQ ID NO: 17027 - DNA, 19 bp, Homo sapiens
aagtgcaaagctttcttgt

SEQ ID NO: 17028 - DNA, 19 bp, Homo sapiens
agtgcaaagctttcttgtg

SEQ ID NO: 17029 - DNA, 19 bp, Homo sapiens
gtgcaaagctttcttgtgc

SEQ ID NO: 17030 - DNA, 19 bp, Homo sapiens
tgcaaagctttcttgtgca

SEQ ID NO: 17031 - DNA, 19 bp, Homo sapiens
gcaaagctttcttgtgcat

SEQ ID NO: 17032 - DNA, 19 bp, Homo sapiens
caaagctttcttgtgcatg

SEQ ID NO: 17033 - DNA, 19 bp, Homo sapiens
aaagctttcttgtgcatga

SEQ ID NO: 17034 - DNA, 19 bp, Homo sapiens
aagctttcttgtgcatgac

SEQ ID NO: 17035 - DNA, 19 bp, Homo sapiens
agctttcttgtgcatgacg

SEQ ID NO: 17036 - DNA, 19 bp, Homo sapiens
gctttcttgtgcatgacgc

SEQ ID NO: 17037 - DNA, 19 bp, Homo sapiens
ctttcttgtgcatgacgcc

SEQ ID NO: 17038 - DNA, 19 bp, Homo sapiens
tttcttgtgcatgacgccc

SEQ ID NO: 17039 - DNA, 19 bp, Homo sapiens
ttcttgtgcatgacgccct

SEQ ID NO: 17040 - DNA, 19 bp, Homo sapiens
tcttgtgcatgacgccctg

SEQ ID NO: 17041 - DNA, 19 bp, Homo sapiens
cttgtgcatgacgccctgc

SEQ ID NO: 17042 - DNA, 19 bp, Homo sapiens
ttgtgcatgacgccctgct

SEQ ID NO: 17043 - DNA, 19 bp, Homo sapiens
tgtgcatgacgccctgctc

SEQ ID NO: 17044 - DNA, 19 bp, Homo sapiens
gtgcatgacgccctgctct

SEQ ID NO: 17045 - DNA, 19 bp, Homo sapiens
tgcatgacgccctgctctg

SEQ ID NO: 17046 - DNA, 19 bp, Homo sapiens
gcatgacgccctgctctgg

SEQ ID NO: 17047 - DNA, 19 bp, Homo sapiens
catgacgccctgctctggg

SEQ ID NO: 17048 - DNA, 19 bp, Homo sapiens
atgacgccctgctctgggg

SEQ ID NO: 17049 - DNA, 19 bp, Homo sapiens
tgacgccctgctctgggga

SEQ ID NO: 17050 - DNA, 19 bp, Homo sapiens
gacgccctgctctggggag

SEQ ID NO: 17051 - DNA, 19 bp, Homo sapiens
acgccctgctctggggagc

SEQ ID NO: 17052 - DNA, 19 bp, Homo sapiens
cgccctgctctggggagcg

SEQ ID NO: 17053 - DNA, 19 bp, Homo sapiens
gccctgctctggggagcgt

SEQ ID NO: 17054 - DNA, 19 bp, Homo sapiens
ccctgctctggggagcgtc

SEQ ID NO: 17055 - DNA, 19 bp, Homo sapiens
cctgctctggggagcgtct

SEQ ID NO: 17056 - DNA, 19 bp, Homo sapiens
ctgctctggggagcgtctg

SEQ ID NO: 17057 - DNA, 19 bp, Homo sapiens
tgctctggggagcgtctgg

SEQ ID NO: 17058 - DNA, 19 bp, Homo sapiens
gctctggggagcgtctggc

SEQ ID NO: 17059 - DNA, 19 bp, Homo sapiens
ctctggggagcgtctggcg

SEQ ID NO: 17060 - DNA, 19 bp, Homo sapiens
tctggggagcgtctggcgc

SEQ ID NO: 17061 - DNA, 19 bp, Homo sapiens
ctggggagcgtctggcgcg

SEQ ID NO: 17062 - DNA, 19 bp, Homo sapiens
tggggagcgtctggcgcga

SEQ ID NO: 17063 - DNA, 19 bp, Homo sapiens
ggggagcgtctggcgcgat

SEQ ID NO: 17064 - DNA, 19 bp, Homo sapiens
gggagcgtctggcgcgatc

SEQ ID NO: 17065 - DNA, 19 bp, Homo sapiens
ggagcgtctggcgcgatct

SEQ ID NO: 17066 - DNA, 19 bp, Homo sapiens
gagcgtctggcgcgatctc

SEQ ID NO: 17067 - DNA, 19 bp, Homo sapiens
agcgtctggcgcgatctct

SEQ ID NO: 17068 - DNA, 19 bp, Homo sapiens
gcgtctggcgcgatctctg

SEQ ID NO: 17069 - DNA, 19 bp, Homo sapiens
cgtctggcgcgatctctgc

SEQ ID NO: 17070 - DNA, 19 bp, Homo sapiens
gtctggcgcgatctctgcc

SEQ ID NO: 17071 - DNA, 19 bp, Homo sapiens
tctggcgcgatctctgcct

SEQ ID NO: 17072 - DNA, 19 bp, Homo sapiens
ctggcgcgatctctgcctg

SEQ ID NO: 17073 - DNA, 19 bp, Homo sapiens
tggcgcgatctctgcctgc

SEQ ID NO: 17074 - DNA, 19 bp, Homo sapiens
ggcgcgatctctgcctgct

SEQ ID NO: 17075 - DNA, 19 bp, Homo sapiens
gcgcgatctctgcctgctt

SEQ ID NO: 17076 - DNA, 19 bp, Homo sapiens
cgcgatctctgcctgctta

SEQ ID NO: 17077 - DNA, 19 bp, Homo sapiens
gcgatctctgcctgcttac

SEQ ID NO: 17078 - DNA, 19 bp, Homo sapiens
cgatctctgcctgcttact

SEQ ID NO: 17079 - DNA, 19 bp, Homo sapiens
gatctctgcctgcttactc

SEQ ID NO: 17080 - DNA, 19 bp, Homo sapiens
atctctgcctgcttactcg

SEQ ID NO: 17081 - DNA, 19 bp, Homo sapiens
tctctgcctgcttactcgg

SEQ ID NO: 17082 - DNA, 19 bp, Homo sapiens
ctctgcctgcttactcggg

SEQ ID NO: 17083 - DNA, 19 bp, Homo sapiens
tctgcctgcttactcggga

SEQ ID NO: 17084 - DNA, 19 bp, Homo sapiens
ctgcctgcttactcgggaa

SEQ ID NO: 17085 - DNA, 19 bp, Homo sapiens
tgcctgcttactcgggaaa

SEQ ID NO: 17086 - DNA, 19 bp, Homo sapiens
gcctgcttactcgggaaat

SEQ ID NO: 17087 - DNA, 19 bp, Homo sapiens
cctgcttactcgggaaatt

SEQ ID NO: 17088 - DNA, 19 bp, Homo sapiens
ctgcttactcgggaaattt

SEQ ID NO: 17089 - DNA, 19 bp, Homo sapiens
tgcttactcgggaaatttg

SEQ ID NO: 17090 - DNA, 19 bp, Homo sapiens
gcttactcgggaaatttgc

SEQ ID NO: 17091 - DNA, 19 bp, Homo sapiens
cttactcgggaaatttgct

SEQ ID NO: 17092 - DNA, 19 bp, Homo sapiens
ttactcgggaaatttgctt

SEQ ID NO: 17093 - DNA, 19 bp, Homo sapiens
tactcgggaaatttgcttt

SEQ ID NO: 17094 - DNA, 19 bp, Homo sapiens
actcgggaaatttgctttt

SEQ ID NO: 17095 - DNA, 19 bp, Homo sapiens
ctcgggaaatttgcttttg

SEQ ID NO: 17096 - DNA, 19 bp, Homo sapiens
tcgggaaatttgcttttgc

SEQ ID NO: 17097 - DNA, 19 bp, Homo sapiens
cgggaaatttgcttttgcc

SEQ ID NO: 17098 - DNA, 19 bp, Homo sapiens
gggaaatttgcttttgcca

SEQ ID NO: 17099 - DNA, 19 bp, Homo sapiens
ggaaatttgcttttgccaa

SEQ ID NO: 17100 - DNA, 19 bp, Homo sapiens
gaaatttgcttttgccaaa

SEQ ID NO: 17101 - DNA, 19 bp, Homo sapiens
aaatttgcttttgccaaac

SEQ ID NO: 17102 - DNA, 19 bp, Homo sapiens
aatttgcttttgccaaacc

SEQ ID NO: 17103 - DNA, 19 bp, Homo sapiens
atttgcttttgccaaaccc

SEQ ID NO: 17104 - DNA, 19 bp, Homo sapiens
tttgcttttgccaaacccg

SEQ ID NO: 17105 - DNA, 19 bp, Homo sapiens
ttgcttttgccaaacccgc

SEQ ID NO: 17106 - DNA, 19 bp, Homo sapiens
tgcttttgccaaacccgct

SEQ ID NO: 17107 - DNA, 19 bp, Homo sapiens
gcttttgccaaacccgctt

SEQ ID NO: 17108 - DNA, 19 bp, Homo sapiens
cttttgccaaacccgcttt

SEQ ID NO: 17109 - DNA, 19 bp, Homo sapiens
ttttgccaaacccgctttt

SEQ ID NO: 17110 - DNA, 19 bp, Homo sapiens
tttgccaaacccgcttttt

SEQ ID NO: 17111 - DNA, 19 bp, Homo sapiens
ttgccaaacccgctttttc

SEQ ID NO: 17112 - DNA, 19 bp, Homo sapiens
tgccaaacccgctttttcg

SEQ ID NO: 17113 - DNA, 19 bp, Homo sapiens
gccaaacccgctttttcgg

SEQ ID NO: 17114 - DNA, 19 bp, Homo sapiens
ccaaacccgctttttcggg

SEQ ID NO: 17115 - DNA, 19 bp, Homo sapiens
caaacccgctttttcgggg

SEQ ID NO: 17116 - DNA, 19 bp, Homo sapiens
aaacccgctttttcgggga

SEQ ID NO: 17117 - DNA, 19 bp, Homo sapiens
aacccgctttttcggggat

SEQ ID NO: 17118 - DNA, 19 bp, Homo sapiens
acccgctttttcggggatc

SEQ ID NO: 17119 - DNA, 19 bp, Homo sapiens
cccgctttttcggggatcc

SEQ ID NO: 17120 - DNA, 19 bp, Homo sapiens
ccgctttttcggggatccc

SEQ ID NO: 17121 - DNA, 19 bp, Homo sapiens
cgctttttcggggatcccg

SEQ ID NO: 17122 - DNA, 19 bp, Homo sapiens
gctttttcggggatcccgc

SEQ ID NO: 17123 - DNA, 19 bp, Homo sapiens
ctttttcggggatcccgcg

SEQ ID NO: 17124 - DNA, 19 bp, Homo sapiens
tttttcggggatcccgcgc

SEQ ID NO: 17125 - DNA, 19 bp, Homo sapiens
ttttcggggatcccgcgcc

SEQ ID NO: 17126 - DNA, 19 bp, Homo sapiens
tttcggggatcccgcgccc

SEQ ID NO: 17127 - DNA, 19 bp, Homo sapiens
ttcggggatcccgcgcccc

SEQ ID NO: 17128 - DNA, 19 bp, Homo sapiens
tcggggatcccgcgccccc

SEQ ID NO: 17129 - DNA, 19 bp, Homo sapiens
cggggatcccgcgcccccc

SEQ ID NO: 17130 - DNA, 19 bp, Homo sapiens
ggggatcccgcgcccccct

SEQ ID NO: 17131 - DNA, 19 bp, Homo sapiens
gggatcccgcgcccccctc

SEQ ID NO: 17132 - DNA, 19 bp, Homo sapiens
ggatcccgcgcccccctcc

SEQ ID NO: 17133 - DNA, 19 bp, Homo sapiens
gatcccgcgcccccctcct

SEQ ID NO: 17134 - DNA, 19 bp, Homo sapiens
atcccgcgcccccctcctc

SEQ ID NO: 17135 - DNA, 19 bp, Homo sapiens
tcccgcgcccccctcctca

SEQ ID NO: 17136 - DNA, 19 bp, Homo sapiens
cccgcgcccccctcctcac

SEQ ID NO: 17137 - DNA, 19 bp, Homo sapiens
ccgcgcccccctcctcact

SEQ ID NO: 17138 - DNA, 19 bp, Homo sapiens
cgcgcccccctcctcactt

SEQ ID NO: 17139 - DNA, 19 bp, Homo sapiens
gcgcccccctcctcacttg

SEQ ID NO: 17140 - DNA, 19 bp, Homo sapiens
cgcccccctcctcacttgc

SEQ ID NO: 17141 - DNA, 19 bp, Homo sapiens
gcccccctcctcacttgcg

SEQ ID NO: 17142 - DNA, 19 bp, Homo sapiens
cccccctcctcacttgcgc

SEQ ID NO: 17143 - DNA, 19 bp, Homo sapiens
ccccctcctcacttgcgct

SEQ ID NO: 17144 - DNA, 19 bp, Homo sapiens
cccctcctcacttgcgctg

SEQ ID NO: 17145 - DNA, 19 bp, Homo sapiens
ccctcctcacttgcgctgc

SEQ ID NO: 17146 - DNA, 19 bp, Homo sapiens
cctcctcacttgcgctgct

SEQ ID NO: 17147 - DNA, 19 bp, Homo sapiens
ctcctcacttgcgctgctc

SEQ ID NO: 17148 - DNA, 19 bp, Homo sapiens
tcctcacttgcgctgctct

SEQ ID NO: 17149 - DNA, 19 bp, Homo sapiens
cctcacttgcgctgctctc

SEQ ID NO: 17150 - DNA, 19 bp, Homo sapiens
ctcacttgcgctgctctcg

SEQ ID NO: 17151 - DNA, 19 bp, Homo sapiens
tcacttgcgctgctctcgg

SEQ ID NO: 17152 - DNA, 19 bp, Homo sapiens
cacttgcgctgctctcgga

SEQ ID NO: 17153 - DNA, 19 bp, Homo sapiens
acttgcgctgctctcggag

SEQ ID NO: 17154 - DNA, 19 bp, Homo sapiens
cttgcgctgctctcggagc

SEQ ID NO: 17155 - DNA, 19 bp, Homo sapiens
ttgcgctgctctcggagcc

SEQ ID NO: 17156 - DNA, 19 bp, Homo sapiens
tgcgctgctctcggagccc

SEQ ID NO: 17157 - DNA, 19 bp, Homo sapiens
gcgctgctctcggagcccc

SEQ ID NO: 17158 - DNA, 19 bp, Homo sapiens
cgctgctctcggagcccca

SEQ ID NO: 17159 - DNA, 19 bp, Homo sapiens
gctgctctcggagccccag

SEQ ID NO: 17160 - DNA, 19 bp, Homo sapiens
ctgctctcggagccccagc

SEQ ID NO: 17161 - DNA, 19 bp, Homo sapiens
tgctctcggagccccagcc

SEQ ID NO: 17162 - DNA, 19 bp, Homo sapiens
gctctcggagccccagccg

SEQ ID NO: 17163 - DNA, 19 bp, Homo sapiens
ctctcggagccccagccgg

SEQ ID NO: 17164 - DNA, 19 bp, Homo sapiens
tctcggagccccagccggc

SEQ ID NO: 17165 - DNA, 19 bp, Homo sapiens
ctcggagccccagccggct

SEQ ID NO: 17166 - DNA, 19 bp, Homo sapiens
tcggagccccagccggctc

SEQ ID NO: 17167 - DNA, 19 bp, Homo sapiens
cggagccccagccggctcc

SEQ ID NO: 17168 - DNA, 19 bp, Homo sapiens
ggagccccagccggctccg

SEQ ID NO: 17169 - DNA, 19 bp, Homo sapiens
gagccccagccggctccgc

SEQ ID NO: 17170 - DNA, 19 bp, Homo sapiens
agccccagccggctccgcc

SEQ ID NO: 17171 - DNA, 19 bp, Homo sapiens
gccccagccggctccgccc

SEQ ID NO: 17172 - DNA, 19 bp, Homo sapiens
ccccagccggctccgcccg

SEQ ID NO: 17173 - DNA, 19 bp, Homo sapiens
cccagccggctccgcccgc

SEQ ID NO: 17174 - DNA, 19 bp, Homo sapiens
ccagccggctccgcccgct

SEQ ID NO: 17175 - DNA, 19 bp, Homo sapiens
cagccggctccgcccgctt

SEQ ID NO: 17176 - DNA, 19 bp, Homo sapiens
agccggctccgcccgcttc

SEQ ID NO: 17177 - DNA, 19 bp, Homo sapiens
gccggctccgcccgcttcg

SEQ ID NO: 17178 - DNA, 19 bp, Homo sapiens
ccggctccgcccgcttcgg

SEQ ID NO: 17179 - DNA, 19 bp, Homo sapiens
cggctccgcccgcttcggc

SEQ ID NO: 17180 - DNA, 19 bp, Homo sapiens
ggctccgcccgcttcggcg

SEQ ID NO: 17181 - DNA, 19 bp, Homo sapiens
gctccgcccgcttcggcgg

SEQ ID NO: 17182 - DNA, 19 bp, Homo sapiens
ctccgcccgcttcggcggt

SEQ ID NO: 17183 - DNA, 19 bp, Homo sapiens
tccgcccgcttcggcggtt

SEQ ID NO: 17184 - DNA, 19 bp, Homo sapiens
ccgcccgcttcggcggttt

SEQ ID NO: 17185 - DNA, 19 bp, Homo sapiens
cgcccgcttcggcggtttg

SEQ ID NO: 17186 - DNA, 19 bp, Homo sapiens
gcccgcttcggcggtttgg

SEQ ID NO: 17187 - DNA, 19 bp, Homo sapiens
cccgcttcggcggtttgga

SEQ ID NO: 17188 - DNA, 19 bp, Homo sapiens
ccgcttcggcggtttggat

SEQ ID NO: 17189 - DNA, 19 bp, Homo sapiens
cgcttcggcggtttggata

SEQ ID NO: 17190 - DNA, 19 bp, Homo sapiens
gcttcggcggtttggatat

SEQ ID NO: 17191 - DNA, 19 bp, Homo sapiens
cttcggcggtttggatatt

SEQ ID NO: 17192 - DNA, 19 bp, Homo sapiens
ttcggcggtttggatattt

SEQ ID NO: 17193 - DNA, 19 bp, Homo sapiens
tcggcggtttggatattta

SEQ ID NO: 17194 - DNA, 19 bp, Homo sapiens
cggcggtttggatatttat

SEQ ID NO: 17195 - DNA, 19 bp, Homo sapiens
ggcggtttggatatttatt

SEQ ID NO: 17196 - DNA, 19 bp, Homo sapiens
gcggtttggatatttattg

SEQ ID NO: 17197 - DNA, 19 bp, Homo sapiens
cggtttggatatttattga

SEQ ID NO: 17198 - DNA, 19 bp, Homo sapiens
ggtttggatatttattgac

SEQ ID NO: 17199 - DNA, 19 bp, Homo sapiens
gtttggatatttattgacc

SEQ ID NO: 17200 - DNA, 19 bp, Homo sapiens
tttggatatttattgacct

SEQ ID NO: 17201 - DNA, 19 bp, Homo sapiens
ttggatatttattgacctc

SEQ ID NO: 17202 - DNA, 19 bp, Homo sapiens
tggatatttattgacctcg

SEQ ID NO: 17203 - DNA, 19 bp, Homo sapiens
ggatatttattgacctcgt

SEQ ID NO: 17204 - DNA, 19 bp, Homo sapiens
gatatttattgacctcgtc

SEQ ID NO: 17205 - DNA, 19 bp, Homo sapiens
atatttattgacctcgtcc

SEQ ID NO: 17206 - DNA, 19 bp, Homo sapiens
tatttattgacctcgtcct

SEQ ID NO: 17207 - DNA, 19 bp, Homo sapiens
atttattgacctcgtcctc

SEQ ID NO: 17208 - DNA, 19 bp, Homo sapiens
tttattgacctcgtcctcc

SEQ ID NO: 17209 - DNA, 19 bp, Homo sapiens
ttattgacctcgtcctccg

SEQ ID NO: 17210 - DNA, 19 bp, Homo sapiens
tattgacctcgtcctccga

SEQ ID NO: 17211 - DNA, 19 bp, Homo sapiens
attgacctcgtcctccgac

SEQ ID NO: 17212 - DNA, 19 bp, Homo sapiens
ttgacctcgtcctccgact

SEQ ID NO: 17213 - DNA, 19 bp, Homo sapiens
tgacctcgtcctccgactc

SEQ ID NO: 17214 - DNA, 19 bp, Homo sapiens
gacctcgtcctccgactcg

SEQ ID NO: 17215 - DNA, 19 bp, Homo sapiens
acctcgtcctccgactcgc

SEQ ID NO: 17216 - DNA, 19 bp, Homo sapiens
cctcgtcctccgactcgct

SEQ ID NO: 17217 - DNA, 19 bp, Homo sapiens
ctcgtcctccgactcgctg

SEQ ID NO: 17218 - DNA, 19 bp, Homo sapiens
tcgtcctccgactcgctga

SEQ ID NO: 17219 - DNA, 19 bp, Homo sapiens
cgtcctccgactcgctgac

SEQ ID NO: 17220 - DNA, 19 bp, Homo sapiens
gtcctccgactcgctgaca

SEQ ID NO: 17221 - DNA, 19 bp, Homo sapiens
tcctccgactcgctgacag

SEQ ID NO: 17222 - DNA, 19 bp, Homo sapiens
cctccgactcgctgacagg

SEQ ID NO: 17223 - DNA, 19 bp, Homo sapiens
ctccgactcgctgacaggc

SEQ ID NO: 17224 - DNA, 19 bp, Homo sapiens
tccgactcgctgacaggct

SEQ ID NO: 17225 - DNA, 19 bp, Homo sapiens
ccgactcgctgacaggcta

SEQ ID NO: 17226 - DNA, 19 bp, Homo sapiens
cgactcgctgacaggctac

SEQ ID NO: 17227 - DNA, 19 bp, Homo sapiens
gactcgctgacaggctaca

SEQ ID NO: 17228 - DNA, 19 bp, Homo sapiens
actcgctgacaggctacag

SEQ ID NO: 17229 - DNA, 19 bp, Homo sapiens
ctcgctgacaggctacagg

SEQ ID NO: 17230 - DNA, 19 bp, Homo sapiens
tcgctgacaggctacagga

SEQ ID NO: 17231 - DNA, 19 bp, Homo sapiens
cgctgacaggctacaggac

SEQ ID NO: 17232 - DNA, 19 bp, Homo sapiens
gctgacaggctacaggacc

SEQ ID NO: 17233 - DNA, 19 bp, Homo sapiens
ctgacaggctacaggaccc

SEQ ID NO: 17234 - DNA, 19 bp, Homo sapiens
tgacaggctacaggacccc

SEQ ID NO: 17235 - DNA, 19 bp, Homo sapiens
gacaggctacaggaccccc

SEQ ID NO: 17236 - DNA, 19 bp, Homo sapiens
acaggctacaggaccccca

SEQ ID NO: 17237 - DNA, 19 bp, Homo sapiens
caggctacaggacccccaa

SEQ ID NO: 17238 - DNA, 19 bp, Homo sapiens
aggctacaggacccccaac

SEQ ID NO: 17239 - DNA, 19 bp, Homo sapiens
ggctacaggacccccaaca

SEQ ID NO: 17240 - DNA, 19 bp, Homo sapiens
gctacaggacccccaacaa

SEQ ID NO: 17241 - DNA, 19 bp, Homo sapiens
ctacaggacccccaacaac

SEQ ID NO: 17242 - DNA, 19 bp, Homo sapiens
tacaggacccccaacaacc

SEQ ID NO: 17243 - DNA, 19 bp, Homo sapiens
acaggacccccaacaaccc

SEQ ID NO: 17244 - DNA, 19 bp, Homo sapiens
caggacccccaacaacccc

SEQ ID NO: 17245 - DNA, 19 bp, Homo sapiens
aggacccccaacaacccca

SEQ ID NO: 17246 - DNA, 19 bp, Homo sapiens
ggacccccaacaaccccaa

SEQ ID NO: 17247 - DNA, 19 bp, Homo sapiens
gacccccaacaaccccaat

SEQ ID NO: 17248 - DNA, 19 bp, Homo sapiens
acccccaacaaccccaatc

SEQ ID NO: 17249 - DNA, 19 bp, Homo sapiens
cccccaacaaccccaatcc

SEQ ID NO: 17250 - DNA, 19 bp, Homo sapiens
ccccaacaaccccaatcca

SEQ ID NO: 17251 - DNA, 19 bp, Homo sapiens
cccaacaaccccaatccac

SEQ ID NO: 17252 - DNA, 19 bp, Homo sapiens
ccaacaaccccaatccacg

SEQ ID NO: 17253 - DNA, 19 bp, Homo sapiens
caacaaccccaatccacgt

SEQ ID NO: 17254 - DNA, 19 bp, Homo sapiens
aacaaccccaatccacgtt

SEQ ID NO: 17255 - DNA, 19 bp, Homo sapiens
acaaccccaatccacgttt

SEQ ID NO: 17256 - DNA, 19 bp, Homo sapiens
caaccccaatccacgtttt

SEQ ID NO: 17257 - DNA, 19 bp, Homo sapiens
aaccccaatccacgttttg

SEQ ID NO: 17258 - DNA, 19 bp, Homo sapiens
accccaatccacgttttgg

SEQ ID NO: 17259 - DNA, 19 bp, Homo sapiens
ccccaatccacgttttgga

SEQ ID NO: 17260 - DNA, 19 bp, Homo sapiens
cccaatccacgttttggat

SEQ ID NO: 17261 - DNA, 19 bp, Homo sapiens
ccaatccacgttttggatg

SEQ ID NO: 17262 - DNA, 19 bp, Homo sapiens
caatccacgttttggatgc

SEQ ID NO: 17263 - DNA, 19 bp, Homo sapiens
aatccacgttttggatgca

SEQ ID NO: 17264 - DNA, 19 bp, Homo sapiens
atccacgttttggatgcac

SEQ ID NO: 17265 - DNA, 19 bp, Homo sapiens
tccacgttttggatgcact

SEQ ID NO: 17266 - DNA, 19 bp, Homo sapiens
ccacgttttggatgcactg

SEQ ID NO: 17267 - DNA, 19 bp, Homo sapiens
cacgttttggatgcactga

SEQ ID NO: 17268 - DNA, 19 bp, Homo sapiens
acgttttggatgcactgag

SEQ ID NO: 17269 - DNA, 19 bp, Homo sapiens
cgttttggatgcactgaga

SEQ ID NO: 17270 - DNA, 19 bp, Homo sapiens
gttttggatgcactgagac

SEQ ID NO: 17271 - DNA, 19 bp, Homo sapiens
ttttggatgcactgagacc

SEQ ID NO: 17272 - DNA, 19 bp, Homo sapiens
tttggatgcactgagaccc

SEQ ID NO: 17273 - DNA, 19 bp, Homo sapiens
ttggatgcactgagacccc

SEQ ID NO: 17274 - DNA, 19 bp, Homo sapiens
tggatgcactgagaccccg

SEQ ID NO: 17275 - DNA, 19 bp, Homo sapiens
ggatgcactgagaccccga

SEQ ID NO: 17276 - DNA, 19 bp, Homo sapiens
gatgcactgagaccccgac

SEQ ID NO: 17277 - DNA, 19 bp, Homo sapiens
atgcactgagaccccgaca

SEQ ID NO: 17278 - DNA, 19 bp, Homo sapiens
tgcactgagaccccgacat

SEQ ID NO: 17279 - DNA, 19 bp, Homo sapiens
gcactgagaccccgacatt

SEQ ID NO: 17280 - DNA, 19 bp, Homo sapiens
cactgagaccccgacattc

SEQ ID NO: 17281 - DNA, 19 bp, Homo sapiens
actgagaccccgacattcc

SEQ ID NO: 17282 - DNA, 19 bp, Homo sapiens
ctgagaccccgacattcct

SEQ ID NO: 17283 - DNA, 19 bp, Homo sapiens
tgagaccccgacattcctc

SEQ ID NO: 17284 - DNA, 19 bp, Homo sapiens
gagaccccgacattcctcg

SEQ ID NO: 17285 - DNA, 19 bp, Homo sapiens
agaccccgacattcctcgg

SEQ ID NO: 17286 - DNA, 19 bp, Homo sapiens
gaccccgacattcctcggt

SEQ ID NO: 17287 - DNA, 19 bp, Homo sapiens
accccgacattcctcggta

SEQ ID NO: 17288 - DNA, 19 bp, Homo sapiens
ccccgacattcctcggtat

SEQ ID NO: 17289 - DNA, 19 bp, Homo sapiens
cccgacattcctcggtatt

SEQ ID NO: 17290 - DNA, 19 bp, Homo sapiens
ccgacattcctcggtattt

SEQ ID NO: 17291 - DNA, 19 bp, Homo sapiens
cgacattcctcggtattta

SEQ ID NO: 17292 - DNA, 19 bp, Homo sapiens
gacattcctcggtatttat

SEQ ID NO: 17293 - DNA, 19 bp, Homo sapiens
acattcctcggtatttatt

SEQ ID NO: 17294 - DNA, 19 bp, Homo sapiens
cattcctcggtatttattg

SEQ ID NO: 17295 - DNA, 19 bp, Homo sapiens
attcctcggtatttattgt

SEQ ID NO: 17296 - DNA, 19 bp, Homo sapiens
ttcctcggtatttattgtc

SEQ ID NO: 17297 - DNA, 19 bp, Homo sapiens
tcctcggtatttattgtct

SEQ ID NO: 17298 - DNA, 19 bp, Homo sapiens
cctcggtatttattgtctg

SEQ ID NO: 17299 - DNA, 19 bp, Homo sapiens
ctcggtatttattgtctgt

SEQ ID NO: 17300 - DNA, 19 bp, Homo sapiens
tcggtatttattgtctgtc

SEQ ID NO: 17301 - DNA, 19 bp, Homo sapiens
cggtatttattgtctgtcc

SEQ ID NO: 17302 - DNA, 19 bp, Homo sapiens
ggtatttattgtctgtccc

SEQ ID NO: 17303 - DNA, 19 bp, Homo sapiens
gtatttattgtctgtcccc

SEQ ID NO: 17304 - DNA, 19 bp, Homo sapiens
tatttattgtctgtcccca

SEQ ID NO: 17305 - DNA, 19 bp, Homo sapiens
atttattgtctgtccccac

SEQ ID NO: 17306 - DNA, 19 bp, Homo sapiens
tttattgtctgtccccacc

SEQ ID NO: 17307 - DNA, 19 bp, Homo sapiens
ttattgtctgtccccacct

SEQ ID NO: 17308 - DNA, 19 bp, Homo sapiens
tattgtctgtccccaccta

SEQ ID NO: 17309 - DNA, 19 bp, Homo sapiens
attgtctgtccccacctag

SEQ ID NO: 17310 - DNA, 19 bp, Homo sapiens
ttgtctgtccccacctagg

SEQ ID NO: 17311 - DNA, 19 bp, Homo sapiens
tgtctgtccccacctagga

SEQ ID NO: 17312 - DNA, 19 bp, Homo sapiens
gtctgtccccacctaggac

SEQ ID NO: 17313 - DNA, 19 bp, Homo sapiens
tctgtccccacctaggacc

SEQ ID NO: 17314 - DNA, 19 bp, Homo sapiens
ctgtccccacctaggaccc

SEQ ID NO: 17315 - DNA, 19 bp, Homo sapiens
tgtccccacctaggacccc

SEQ ID NO: 17316 - DNA, 19 bp, Homo sapiens
gtccccacctaggaccccc

SEQ ID NO: 17317 - DNA, 19 bp, Homo sapiens
tccccacctaggaccccca

SEQ ID NO: 17318 - DNA, 19 bp, Homo sapiens
ccccacctaggacccccac

SEQ ID NO: 17319 - DNA, 19 bp, Homo sapiens
cccacctaggacccccacc

SEQ ID NO: 17320 - DNA, 19 bp, Homo sapiens
ccacctaggacccccaccc

SEQ ID NO: 17321 - DNA, 19 bp, Homo sapiens
cacctaggacccccacccc

SEQ ID NO: 17322 - DNA, 19 bp, Homo sapiens
acctaggacccccaccccc

SEQ ID NO: 17323 - DNA, 19 bp, Homo sapiens
cctaggacccccacccccg

SEQ ID NO: 17324 - DNA, 19 bp, Homo sapiens
ctaggacccccacccccga

SEQ ID NO: 17325 - DNA, 19 bp, Homo sapiens
taggacccccacccccgac

SEQ ID NO: 17326 - DNA, 19 bp, Homo sapiens
aggacccccacccccgacc

SEQ ID NO: 17327 - DNA, 19 bp, Homo sapiens
ggacccccacccccgaccc

SEQ ID NO: 17328 - DNA, 19 bp, Homo sapiens
gacccccacccccgaccct

SEQ ID NO: 17329 - DNA, 19 bp, Homo sapiens
acccccacccccgaccctc

SEQ ID NO: 17330 - DNA, 19 bp, Homo sapiens
cccccacccccgaccctcg

SEQ ID NO: 17331 - DNA, 19 bp, Homo sapiens
ccccacccccgaccctcgc

SEQ ID NO: 17332 - DNA, 19 bp, Homo sapiens
cccacccccgaccctcgcg

SEQ ID NO: 17333 - DNA, 19 bp, Homo sapiens
ccacccccgaccctcgcga

SEQ ID NO: 17334 - DNA, 19 bp, Homo sapiens
cacccccgaccctcgcgaa

SEQ ID NO: 17335 - DNA, 19 bp, Homo sapiens
acccccgaccctcgcgaat

SEQ ID NO: 17336 - DNA, 19 bp, Homo sapiens
cccccgaccctcgcgaata

SEQ ID NO: 17337 - DNA, 19 bp, Homo sapiens
ccccgaccctcgcgaataa

SEQ ID NO: 17338 - DNA, 19 bp, Homo sapiens
cccgaccctcgcgaataaa

SEQ ID NO: 17339 - DNA, 19 bp, Homo sapiens
ccgaccctcgcgaataaaa

SEQ ID NO: 17340 - DNA, 19 bp, Homo sapiens
cgaccctcgcgaataaaag

SEQ ID NO: 17341 - DNA, 19 bp, Homo sapiens
gaccctcgcgaataaaagg

SEQ ID NO: 17342 - DNA, 19 bp, Homo sapiens
accctcgcgaataaaaggc

SEQ ID NO: 17343 - DNA, 19 bp, Homo sapiens
ccctcgcgaataaaaggcc

SEQ ID NO: 17344 - DNA, 19 bp, Homo sapiens
cctcgcgaataaaaggccc

SEQ ID NO: 17345 - DNA, 19 bp, Homo sapiens
ctcgcgaataaaaggccct

SEQ ID NO: 17346 - DNA, 19 bp, Homo sapiens
tcgcgaataaaaggccctc

SEQ ID NO: 17347 - DNA, 19 bp, Homo sapiens
cgcgaataaaaggccctcc

SEQ ID NO: 17348 - DNA, 19 bp, Homo sapiens
gcgaataaaaggccctcca

SEQ ID NO: 17349 - DNA, 19 bp, Homo sapiens
cgaataaaaggccctccat

SEQ ID NO: 17350 - DNA, 19 bp, Homo sapiens
gaataaaaggccctccatc

SEQ ID NO: 17351 - DNA, 19 bp, Homo sapiens
aataaaaggccctccatct

SEQ ID NO: 17352 - DNA, 19 bp, Homo sapiens
ataaaaggccctccatctg

SEQ ID NO: 17353 - DNA, 19 bp, Homo sapiens
taaaaggccctccatctgc

SEQ ID NO: 17354 - DNA, 19 bp, Homo sapiens
aaaaggccctccatctgcc

SEQ ID NO: 17355 - DNA, 19 bp, Homo sapiens
aaaggccctccatctgccc

SEQ ID NO: 17356 - DNA, 19 bp, Homo sapiens
aaggccctccatctgccca

SEQ ID NO: 17357 - DNA, 19 bp, Homo sapiens
aggccctccatctgcccaa

SEQ ID NO: 17358 - DNA, 19 bp, Homo sapiens
ggccctccatctgcccaaa

SEQ ID NO: 17359 - DNA, 19 bp, Homo sapiens
gccctccatctgcccaaag

SEQ ID NO: 17360 - DNA, 19 bp, Homo sapiens
ccctccatctgcccaaagc

SEQ ID NO: 17361 - DNA, 19 bp, Homo sapiens
cctccatctgcccaaagct

SEQ ID NO: 17362 - DNA, 19 bp, Homo sapiens
ctccatctgcccaaagctc

SEQ ID NO: 17363 - DNA, 19 bp, Homo sapiens
tccatctgcccaaagctct

SEQ ID NO: 17364 - DNA, 19 bp, Homo sapiens
ccatctgcccaaagctctg

SEQ ID NO: 17365 - DNA, 19 bp, Homo sapiens
catctgcccaaagctctgg

SEQ ID NO: 17366 - DNA, 19 bp, Homo sapiens
atctgcccaaagctctgga

SEQ ID NO: 17367 - DNA, 19 bp, Homo sapiens
agagaggcccaggggacaa

SEQ ID NO: 17368 - DNA, 19 bp, Homo sapiens
gagaggcccaggggacaga

SEQ ID NO: 17369 - DNA, 19 bp, Homo sapiens
agaggcccaggggacagca

SEQ ID NO: 17370 - DNA, 19 bp, Homo sapiens
aggcccaggggacagccaa

SEQ ID NO: 17371 - DNA, 19 bp, Homo sapiens
ggcccaggggacagccaga

SEQ ID NO: 17372 - DNA, 19 bp, Homo sapiens
gcccaggggacagccagga

SEQ ID NO: 17373 - DNA, 19 bp, Homo sapiens
ccaggggacagccagggaa

SEQ ID NO: 17374 - DNA, 19 bp, Homo sapiens
aggggacagccagggacaa

SEQ ID NO: 17375 - DNA, 19 bp, Homo sapiens
ggggacagccagggacaga

SEQ ID NO: 17376 - DNA, 19 bp, Homo sapiens
gggacagccagggacagga

SEQ ID NO: 17377 - DNA, 19 bp, Homo sapiens
gacagccagggacaggcaa

SEQ ID NO: 17378 - DNA, 19 bp, Homo sapiens
cagccagggacaggcagaa

SEQ ID NO: 17379 - DNA, 19 bp, Homo sapiens
gccagggacaggcagacaa

SEQ ID NO: 17380 - DNA, 19 bp, Homo sapiens
ccagggacaggcagacata

SEQ ID NO: 17381 - DNA, 19 bp, Homo sapiens
cagggacaggcagacatga

SEQ ID NO: 17382 - DNA, 19 bp, Homo sapiens
gggacaggcagacatgcaa

SEQ ID NO: 17383 - DNA, 19 bp, Homo sapiens
ggacaggcagacatgcaga

SEQ ID NO: 17384 - DNA, 19 bp, Homo sapiens
gacaggcagacatgcagca

SEQ ID NO: 17385 - DNA, 19 bp, Homo sapiens
caggcagacatgcagccaa

SEQ ID NO: 17386 - DNA, 19 bp, Homo sapiens
aggcagacatgcagccaga

SEQ ID NO: 17387 - DNA, 19 bp, Homo sapiens
ggcagacatgcagccagga

SEQ ID NO: 17388 - DNA, 19 bp, Homo sapiens
gcagacatgcagccaggga

SEQ ID NO: 17389 - DNA, 19 bp, Homo sapiens
cagacatgcagccagggca

SEQ ID NO: 17390 - DNA, 19 bp, Homo sapiens
agacatgcagccagggcta

SEQ ID NO: 17391 - DNA, 19 bp, Homo sapiens
gacatgcagccagggctca

SEQ ID NO: 17392 - DNA, 19 bp, Homo sapiens
catgcagccagggctccaa

SEQ ID NO: 17393 - DNA, 19 bp, Homo sapiens
atgcagccagggctccaga

SEQ ID NO: 17394 - DNA, 19 bp, Homo sapiens
tgcagccagggctccagga

SEQ ID NO: 17395 - DNA, 19 bp, Homo sapiens
gcagccagggctccaggga

SEQ ID NO: 17396 - DNA, 19 bp, Homo sapiens
cagccagggctccagggca

SEQ ID NO: 17397 - DNA, 19 bp, Homo sapiens
agccagggctccagggcca

SEQ ID NO: 17398 - DNA, 19 bp, Homo sapiens
gccagggctccagggccta

SEQ ID NO: 17399 - DNA, 19 bp, Homo sapiens
ccagggctccagggcctga

SEQ ID NO: 17400 - DNA, 19 bp, Homo sapiens
agggctccagggcctggaa

SEQ ID NO: 17401 - DNA, 19 bp, Homo sapiens
ggctccagggcctggacaa

SEQ ID NO: 17402 - DNA, 19 bp, Homo sapiens
gctccagggcctggacaga

SEQ ID NO: 17403 - DNA, 19 bp, Homo sapiens
ctccagggcctggacagga

SEQ ID NO: 17404 - DNA, 19 bp, Homo sapiens
tccagggcctggacaggga

SEQ ID NO: 17405 - DNA, 19 bp, Homo sapiens
ccagggcctggacagggga

SEQ ID NO: 17406 - DNA, 19 bp, Homo sapiens
cagggcctggacaggggca

SEQ ID NO: 17407 - DNA, 19 bp, Homo sapiens
agggcctggacaggggcta

SEQ ID NO: 17408 - DNA, 19 bp, Homo sapiens
gggcctggacaggggctga

SEQ ID NO: 17409 - DNA, 19 bp, Homo sapiens
ggcctggacaggggctgca

SEQ ID NO: 17410 - DNA, 19 bp, Homo sapiens
cctggacaggggctgccaa

SEQ ID NO: 17411 - DNA, 19 bp, Homo sapiens
ctggacaggggctgccaga

SEQ ID NO: 17412 - DNA, 19 bp, Homo sapiens
tggacaggggctgccagga

SEQ ID NO: 17413 - DNA, 19 bp, Homo sapiens
ggacaggggctgccaggca

SEQ ID NO: 17414 - DNA, 19 bp, Homo sapiens
gacaggggctgccaggcca

SEQ ID NO: 17415 - DNA, 19 bp, Homo sapiens
acaggggctgccaggccca

SEQ ID NO: 17416 - DNA, 19 bp, Homo sapiens
caggggctgccaggcccta

SEQ ID NO: 17417 - DNA, 19 bp, Homo sapiens
aggggctgccaggccctga

SEQ ID NO: 17418 - DNA, 19 bp, Homo sapiens
ggggctgccaggccctgta

SEQ ID NO: 17419 - DNA, 19 bp, Homo sapiens
ggctgccaggccctgtgaa

SEQ ID NO: 17420 - DNA, 19 bp, Homo sapiens
ctgccaggccctgtgacaa

SEQ ID NO: 17421 - DNA, 19 bp, Homo sapiens
tgccaggccctgtgacaga

SEQ ID NO: 17422 - DNA, 19 bp, Homo sapiens
ccaggccctgtgacaggaa

SEQ ID NO: 17423 - DNA, 19 bp, Homo sapiens
caggccctgtgacaggaga

SEQ ID NO: 17424 - DNA, 19 bp, Homo sapiens
ggccctgtgacaggaggaa

SEQ ID NO: 17425 - DNA, 19 bp, Homo sapiens
gccctgtgacaggaggaca

SEQ ID NO: 17426 - DNA, 19 bp, Homo sapiens
ccctgtgacaggaggacca

SEQ ID NO: 17427 - DNA, 19 bp, Homo sapiens
cctgtgacaggaggaccca

SEQ ID NO: 17428 - DNA, 19 bp, Homo sapiens
ctgtgacaggaggacccca

SEQ ID NO: 17429 - DNA, 19 bp, Homo sapiens
gtgacaggaggaccccgaa

SEQ ID NO: 17430 - DNA, 19 bp, Homo sapiens
tgacaggaggaccccgaga

SEQ ID NO: 17431 - DNA, 19 bp, Homo sapiens
gacaggaggaccccgagca

SEQ ID NO: 17432 - DNA, 19 bp, Homo sapiens
acaggaggaccccgagcca

SEQ ID NO: 17433 - DNA, 19 bp, Homo sapiens
caggaggaccccgagccca

SEQ ID NO: 17434 - DNA, 19 bp, Homo sapiens
aggaggaccccgagcccca

SEQ ID NO: 17435 - DNA, 19 bp, Homo sapiens
ggaggaccccgagccccca

SEQ ID NO: 17436 - DNA, 19 bp, Homo sapiens
gaggaccccgagcccccga

SEQ ID NO: 17437 - DNA, 19 bp, Homo sapiens
aggaccccgagcccccgga

SEQ ID NO: 17438 - DNA, 19 bp, Homo sapiens
ggaccccgagcccccggca

SEQ ID NO: 17439 - DNA, 19 bp, Homo sapiens
gaccccgagcccccggcca

SEQ ID NO: 17440 - DNA, 19 bp, Homo sapiens
accccgagcccccggccca

SEQ ID NO: 17441 - DNA, 19 bp, Homo sapiens
ccccgagcccccggcccga

SEQ ID NO: 17442 - DNA, 19 bp, Homo sapiens
cccgagcccccggcccgga

SEQ ID NO: 17443 - DNA, 19 bp, Homo sapiens
ccgagcccccggcccggga

SEQ ID NO: 17444 - DNA, 19 bp, Homo sapiens
gagcccccggcccggggaa

SEQ ID NO: 17445 - DNA, 19 bp, Homo sapiens
agcccccggcccggggaga

SEQ ID NO: 17446 - DNA, 19 bp, Homo sapiens
gcccccggcccggggagga

SEQ ID NO: 17447 - DNA, 19 bp, Homo sapiens
cccccggcccggggaggga

SEQ ID NO: 17448 - DNA, 19 bp, Homo sapiens
ccccggcccggggagggga

SEQ ID NO: 17449 - DNA, 19 bp, Homo sapiens
cccggcccggggaggggca

SEQ ID NO: 17450 - DNA, 19 bp, Homo sapiens
cggcccggggaggggccaa

SEQ ID NO: 17451 - DNA, 19 bp, Homo sapiens
ggcccggggaggggccata

SEQ ID NO: 17452 - DNA, 19 bp, Homo sapiens
gcccggggaggggccatga

SEQ ID NO: 17453 - DNA, 19 bp, Homo sapiens
cccggggaggggccatgga

SEQ ID NO: 17454 - DNA, 19 bp, Homo sapiens
ccggggaggggccatggta

SEQ ID NO: 17455 - DNA, 19 bp, Homo sapiens
cggggaggggccatggtga

SEQ ID NO: 17456 - DNA, 19 bp, Homo sapiens
ggggaggggccatggtgca

SEQ ID NO: 17457 - DNA, 19 bp, Homo sapiens
gggaggggccatggtgcta

SEQ ID NO: 17458 - DNA, 19 bp, Homo sapiens
ggaggggccatggtgctga

SEQ ID NO: 17459 - DNA, 19 bp, Homo sapiens
gaggggccatggtgctgca

SEQ ID NO: 17460 - DNA, 19 bp, Homo sapiens
aggggccatggtgctgcca

SEQ ID NO: 17461 - DNA, 19 bp, Homo sapiens
ggggccatggtgctgccta

SEQ ID NO: 17462 - DNA, 19 bp, Homo sapiens
gggccatggtgctgcctga

SEQ ID NO: 17463 - DNA, 19 bp, Homo sapiens
ggccatggtgctgcctgta

SEQ ID NO: 17464 - DNA, 19 bp, Homo sapiens
gccatggtgctgcctgtca

SEQ ID NO: 17465 - DNA, 19 bp, Homo sapiens
atggtgctgcctgtccaaa

SEQ ID NO: 17466 - DNA, 19 bp, Homo sapiens
ggtgctgcctgtccaacaa

SEQ ID NO: 17467 - DNA, 19 bp, Homo sapiens
gtgctgcctgtccaacata

SEQ ID NO: 17468 - DNA, 19 bp, Homo sapiens
tgctgcctgtccaacatga

SEQ ID NO: 17469 - DNA, 19 bp, Homo sapiens
gctgcctgtccaacatgta

SEQ ID NO: 17470 - DNA, 19 bp, Homo sapiens
tgcctgtccaacatgtcaa

SEQ ID NO: 17471 - DNA, 19 bp, Homo sapiens
gcctgtccaacatgtcaga

SEQ ID NO: 17472 - DNA, 19 bp, Homo sapiens
cctgtccaacatgtcagca

SEQ ID NO: 17473 - DNA, 19 bp, Homo sapiens
ctgtccaacatgtcagcca

SEQ ID NO: 17474 - DNA, 19 bp, Homo sapiens
gtccaacatgtcagccgaa

SEQ ID NO: 17475 - DNA, 19 bp, Homo sapiens
tccaacatgtcagccgaga

SEQ ID NO: 17476 - DNA, 19 bp, Homo sapiens
ccaacatgtcagccgagga

SEQ ID NO: 17477 - DNA, 19 bp, Homo sapiens
caacatgtcagccgaggta

SEQ ID NO: 17478 - DNA, 19 bp, Homo sapiens
aacatgtcagccgaggtga

SEQ ID NO: 17479 - DNA, 19 bp, Homo sapiens
acatgtcagccgaggtgca

SEQ ID NO: 17480 - DNA, 19 bp, Homo sapiens
catgtcagccgaggtgcga

SEQ ID NO: 17481 - DNA, 19 bp, Homo sapiens
atgtcagccgaggtgcgga

SEQ ID NO: 17482 - DNA, 19 bp, Homo sapiens
tgtcagccgaggtgcggca

SEQ ID NO: 17483 - DNA, 19 bp, Homo sapiens
gtcagccgaggtgcggcta

SEQ ID NO: 17484 - DNA, 19 bp, Homo sapiens
cagccgaggtgcggctgaa

SEQ ID NO: 17485 - DNA, 19 bp, Homo sapiens
agccgaggtgcggctgaga

SEQ ID NO: 17486 - DNA, 19 bp, Homo sapiens
gccgaggtgcggctgagga

SEQ ID NO: 17487 - DNA, 19 bp, Homo sapiens
ccgaggtgcggctgaggca

SEQ ID NO: 17488 - DNA, 19 bp, Homo sapiens
cgaggtgcggctgaggcga

SEQ ID NO: 17489 - DNA, 19 bp, Homo sapiens
gaggtgcggctgaggcgga

SEQ ID NO: 17490 - DNA, 19 bp, Homo sapiens
aggtgcggctgaggcggca

SEQ ID NO: 17491 - DNA, 19 bp, Homo sapiens
ggtgcggctgaggcggcta

SEQ ID NO: 17492 - DNA, 19 bp, Homo sapiens
gtgcggctgaggcggctca

SEQ ID NO: 17493 - DNA, 19 bp, Homo sapiens
gcggctgaggcggctccaa

SEQ ID NO: 17494 - DNA, 19 bp, Homo sapiens
cggctgaggcggctccaga

SEQ ID NO: 17495 - DNA, 19 bp, Homo sapiens
gctgaggcggctccagcaa

SEQ ID NO: 17496 - DNA, 19 bp, Homo sapiens
ctgaggcggctccagcaga

SEQ ID NO: 17497 - DNA, 19 bp, Homo sapiens
tgaggcggctccagcagca

SEQ ID NO: 17498 - DNA, 19 bp, Homo sapiens
gaggcggctccagcagcta

SEQ ID NO: 17499 - DNA, 19 bp, Homo sapiens
aggcggctccagcagctga

SEQ ID NO: 17500 - DNA, 19 bp, Homo sapiens
ggcggctccagcagctgga

SEQ ID NO: 17501 - DNA, 19 bp, Homo sapiens
gcggctccagcagctggta

SEQ ID NO: 17502 - DNA, 19 bp, Homo sapiens
cggctccagcagctggtga

SEQ ID NO: 17503 - DNA, 19 bp, Homo sapiens
ggctccagcagctggtgta

SEQ ID NO: 17504 - DNA, 19 bp, Homo sapiens
gctccagcagctggtgtta

SEQ ID NO: 17505 - DNA, 19 bp, Homo sapiens
ctccagcagctggtgttga

SEQ ID NO: 17506 - DNA, 19 bp, Homo sapiens
ccagcagctggtgttggaa

SEQ ID NO: 17507 - DNA, 19 bp, Homo sapiens
cagcagctggtgttggaca

SEQ ID NO: 17508 - DNA, 19 bp, Homo sapiens
agcagctggtgttggacca

SEQ ID NO: 17509 - DNA, 19 bp, Homo sapiens
gcagctggtgttggaccca

SEQ ID NO: 17510 - DNA, 19 bp, Homo sapiens
cagctggtgttggacccga

SEQ ID NO: 17511 - DNA, 19 bp, Homo sapiens
agctggtgttggacccgga

SEQ ID NO: 17512 - DNA, 19 bp, Homo sapiens
gctggtgttggacccggga

SEQ ID NO: 17513 - DNA, 19 bp, Homo sapiens
ctggtgttggacccgggca

SEQ ID NO: 17514 - DNA, 19 bp, Homo sapiens
tggtgttggacccgggcta

SEQ ID NO: 17515 - DNA, 19 bp, Homo sapiens
ggtgttggacccgggctta

SEQ ID NO: 17516 - DNA, 19 bp, Homo sapiens
gtgttggacccgggcttca

SEQ ID NO: 17517 - DNA, 19 bp, Homo sapiens
tgttggacccgggcttcca

SEQ ID NO: 17518 - DNA, 19 bp, Homo sapiens
gttggacccgggcttccta

SEQ ID NO: 17519 - DNA, 19 bp, Homo sapiens
ttggacccgggcttcctga

SEQ ID NO: 17520 - DNA, 19 bp, Homo sapiens
tggacccgggcttcctgga

SEQ ID NO: 17521 - DNA, 19 bp, Homo sapiens
ggacccgggcttcctggga

SEQ ID NO: 17522 - DNA, 19 bp, Homo sapiens
gacccgggcttcctgggga

SEQ ID NO: 17523 - DNA, 19 bp, Homo sapiens
acccgggcttcctggggca

SEQ ID NO: 17524 - DNA, 19 bp, Homo sapiens
cccgggcttcctggggcta

SEQ ID NO: 17525 - DNA, 19 bp, Homo sapiens
ccgggcttcctggggctga

SEQ ID NO: 17526 - DNA, 19 bp, Homo sapiens
gggcttcctggggctggaa

SEQ ID NO: 17527 - DNA, 19 bp, Homo sapiens
ggcttcctggggctggaga

SEQ ID NO: 17528 - DNA, 19 bp, Homo sapiens
gcttcctggggctggagca

SEQ ID NO: 17529 - DNA, 19 bp, Homo sapiens
cttcctggggctggagcca

SEQ ID NO: 17530 - DNA, 19 bp, Homo sapiens
ttcctggggctggagccca

SEQ ID NO: 17531 - DNA, 19 bp, Homo sapiens
tcctggggctggagcccca

SEQ ID NO: 17532 - DNA, 19 bp, Homo sapiens
cctggggctggagccccta

SEQ ID NO: 17533 - DNA, 19 bp, Homo sapiens
ctggggctggagcccctga

SEQ ID NO: 17534 - DNA, 19 bp, Homo sapiens
tggggctggagcccctgca

SEQ ID NO: 17535 - DNA, 19 bp, Homo sapiens
ggggctggagcccctgcta

SEQ ID NO: 17536 - DNA, 19 bp, Homo sapiens
gggctggagcccctgctca

SEQ ID NO: 17537 - DNA, 19 bp, Homo sapiens
gctggagcccctgctcgaa

SEQ ID NO: 17538 - DNA, 19 bp, Homo sapiens
ctggagcccctgctcgaca

SEQ ID NO: 17539 - DNA, 19 bp, Homo sapiens
tggagcccctgctcgacca

SEQ ID NO: 17540 - DNA, 19 bp, Homo sapiens
ggagcccctgctcgaccta

SEQ ID NO: 17541 - DNA, 19 bp, Homo sapiens
gagcccctgctcgacctta

SEQ ID NO: 17542 - DNA, 19 bp, Homo sapiens
agcccctgctcgaccttca

SEQ ID NO: 17543 - DNA, 19 bp, Homo sapiens
gcccctgctcgaccttcta

SEQ ID NO: 17544 - DNA, 19 bp, Homo sapiens
cccctgctcgaccttctca

SEQ ID NO: 17545 - DNA, 19 bp, Homo sapiens
ccctgctcgaccttctcca

SEQ ID NO: 17546 - DNA, 19 bp, Homo sapiens
cctgctcgaccttctccta

SEQ ID NO: 17547 - DNA, 19 bp, Homo sapiens
ctgctcgaccttctcctga

SEQ ID NO: 17548 - DNA, 19 bp, Homo sapiens
tgctcgaccttctcctgga

SEQ ID NO: 17549 - DNA, 19 bp, Homo sapiens
gctcgaccttctcctggga

SEQ ID NO: 17550 - DNA, 19 bp, Homo sapiens
ctcgaccttctcctgggca

SEQ ID NO: 17551 - DNA, 19 bp, Homo sapiens
tcgaccttctcctgggcga

SEQ ID NO: 17552 - DNA, 19 bp, Homo sapiens
cgaccttctcctgggcgta

SEQ ID NO: 17553 - DNA, 19 bp, Homo sapiens
gaccttctcctgggcgtca

SEQ ID NO: 17554 - DNA, 19 bp, Homo sapiens
ccttctcctgggcgtccaa

SEQ ID NO: 17555 - DNA, 19 bp, Homo sapiens
cttctcctgggcgtccaca

SEQ ID NO: 17556 - DNA, 19 bp, Homo sapiens
tctcctgggcgtccaccaa

SEQ ID NO: 17557 - DNA, 19 bp, Homo sapiens
ctcctgggcgtccaccaga

SEQ ID NO: 17558 - DNA, 19 bp, Homo sapiens
cctgggcgtccaccaggaa

SEQ ID NO: 17559 - DNA, 19 bp, Homo sapiens
ctgggcgtccaccaggaga

SEQ ID NO: 17560 - DNA, 19 bp, Homo sapiens
tgggcgtccaccaggagca

SEQ ID NO: 17561 - DNA, 19 bp, Homo sapiens
gggcgtccaccaggagcta

SEQ ID NO: 17562 - DNA, 19 bp, Homo sapiens
ggcgtccaccaggagctga

SEQ ID NO: 17563 - DNA, 19 bp, Homo sapiens
gcgtccaccaggagctgga

SEQ ID NO: 17564 - DNA, 19 bp, Homo sapiens
cgtccaccaggagctggga

SEQ ID NO: 17565 - DNA, 19 bp, Homo sapiens
gtccaccaggagctgggca

SEQ ID NO: 17566 - DNA, 19 bp, Homo sapiens
tccaccaggagctgggcga

SEQ ID NO: 17567 - DNA, 19 bp, Homo sapiens
ccaccaggagctgggcgca

SEQ ID NO: 17568 - DNA, 19 bp, Homo sapiens
caccaggagctgggcgcca

SEQ ID NO: 17569 - DNA, 19 bp, Homo sapiens
accaggagctgggcgccta

SEQ ID NO: 17570 - DNA, 19 bp, Homo sapiens
ccaggagctgggcgcctca

SEQ ID NO: 17571 - DNA, 19 bp, Homo sapiens
caggagctgggcgcctcca

SEQ ID NO: 17572 - DNA, 19 bp, Homo sapiens
gagctgggcgcctccgaaa

SEQ ID NO: 17573 - DNA, 19 bp, Homo sapiens
agctgggcgcctccgaaca

SEQ ID NO: 17574 - DNA, 19 bp, Homo sapiens
gctgggcgcctccgaacta

SEQ ID NO: 17575 - DNA, 19 bp, Homo sapiens
ctgggcgcctccgaactga

SEQ ID NO: 17576 - DNA, 19 bp, Homo sapiens
tgggcgcctccgaactgga

SEQ ID NO: 17577 - DNA, 19 bp, Homo sapiens
gggcgcctccgaactggca

SEQ ID NO: 17578 - DNA, 19 bp, Homo sapiens
ggcgcctccgaactggcca

SEQ ID NO: 17579 - DNA, 19 bp, Homo sapiens
cgcctccgaactggcccaa

SEQ ID NO: 17580 - DNA, 19 bp, Homo sapiens
gcctccgaactggcccaga

SEQ ID NO: 17581 - DNA, 19 bp, Homo sapiens
ctccgaactggcccaggaa

SEQ ID NO: 17582 - DNA, 19 bp, Homo sapiens
cgaactggcccaggacaaa

SEQ ID NO: 17583 - DNA, 19 bp, Homo sapiens
gaactggcccaggacaaga

SEQ ID NO: 17584 - DNA, 19 bp, Homo sapiens
actggcccaggacaagtaa

SEQ ID NO: 17585 - DNA, 19 bp, Homo sapiens
ctggcccaggacaagtaca

SEQ ID NO: 17586 - DNA, 19 bp, Homo sapiens
tggcccaggacaagtacga

SEQ ID NO: 17587 - DNA, 19 bp, Homo sapiens
ggcccaggacaagtacgta

SEQ ID NO: 17588 - DNA, 19 bp, Homo sapiens
gcccaggacaagtacgtga

SEQ ID NO: 17589 - DNA, 19 bp, Homo sapiens
cccaggacaagtacgtgga

SEQ ID NO: 17590 - DNA, 19 bp, Homo sapiens
ccaggacaagtacgtggca

SEQ ID NO: 17591 - DNA, 19 bp, Homo sapiens
caggacaagtacgtggcca

SEQ ID NO: 17592 - DNA, 19 bp, Homo sapiens
ggacaagtacgtggccgaa

SEQ ID NO: 17593 - DNA, 19 bp, Homo sapiens
gacaagtacgtggccgaca

SEQ ID NO: 17594 - DNA, 19 bp, Homo sapiens
acaagtacgtggccgacta

SEQ ID NO: 17595 - DNA, 19 bp, Homo sapiens
caagtacgtggccgactta

SEQ ID NO: 17596 - DNA, 19 bp, Homo sapiens
aagtacgtggccgacttca

SEQ ID NO: 17597 - DNA, 19 bp, Homo sapiens
agtacgtggccgacttcta

SEQ ID NO: 17598 - DNA, 19 bp, Homo sapiens
gtacgtggccgacttctta

SEQ ID NO: 17599 - DNA, 19 bp, Homo sapiens
tacgtggccgacttcttga

SEQ ID NO: 17600 - DNA, 19 bp, Homo sapiens
cgtggccgacttcttgcaa

SEQ ID NO: 17601 - DNA, 19 bp, Homo sapiens
gtggccgacttcttgcaga

SEQ ID NO: 17602 - DNA, 19 bp, Homo sapiens
tggccgacttcttgcagta

SEQ ID NO: 17603 - DNA, 19 bp, Homo sapiens
ggccgacttcttgcagtga

SEQ ID NO: 17604 - DNA, 19 bp, Homo sapiens
gccgacttcttgcagtgga

SEQ ID NO: 17605 - DNA, 19 bp, Homo sapiens
ccgacttcttgcagtggga

SEQ ID NO: 17606 - DNA, 19 bp, Homo sapiens
cgacttcttgcagtgggca

SEQ ID NO: 17607 - DNA, 19 bp, Homo sapiens
gacttcttgcagtgggcga

SEQ ID NO: 17608 - DNA, 19 bp, Homo sapiens
cttcttgcagtgggcggaa

SEQ ID NO: 17609 - DNA, 19 bp, Homo sapiens
ttcttgcagtgggcggaga

SEQ ID NO: 17610 - DNA, 19 bp, Homo sapiens
tcttgcagtgggcggagca

SEQ ID NO: 17611 - DNA, 19 bp, Homo sapiens
cttgcagtgggcggagcca

SEQ ID NO: 17612 - DNA, 19 bp, Homo sapiens
tgcagtgggcggagcccaa

SEQ ID NO: 17613 - DNA, 19 bp, Homo sapiens
gcagtgggcggagcccata

SEQ ID NO: 17614 - DNA, 19 bp, Homo sapiens
cagtgggcggagcccatca

SEQ ID NO: 17615 - DNA, 19 bp, Homo sapiens
agtgggcggagcccatcga

SEQ ID NO: 17616 - DNA, 19 bp, Homo sapiens
gtgggcggagcccatcgta

SEQ ID NO: 17617 - DNA, 19 bp, Homo sapiens
tgggcggagcccatcgtga

SEQ ID NO: 17618 - DNA, 19 bp, Homo sapiens
gggcggagcccatcgtgga

SEQ ID NO: 17619 - DNA, 19 bp, Homo sapiens
ggcggagcccatcgtggta

SEQ ID NO: 17620 - DNA, 19 bp, Homo sapiens
cggagcccatcgtggtgaa

SEQ ID NO: 17621 - DNA, 19 bp, Homo sapiens
ggagcccatcgtggtgaga

SEQ ID NO: 17622 - DNA, 19 bp, Homo sapiens
gagcccatcgtggtgagga

SEQ ID NO: 17623 - DNA, 19 bp, Homo sapiens
agcccatcgtggtgaggca

SEQ ID NO: 17624 - DNA, 19 bp, Homo sapiens
gcccatcgtggtgaggcta

SEQ ID NO: 17625 - DNA, 19 bp, Homo sapiens
catcgtggtgaggcttaaa

SEQ ID NO: 17626 - DNA, 19 bp, Homo sapiens
atcgtggtgaggcttaaga

SEQ ID NO: 17627 - DNA, 19 bp, Homo sapiens
cgtggtgaggcttaaggaa

SEQ ID NO: 17628 - DNA, 19 bp, Homo sapiens
gtggtgaggcttaaggaga

SEQ ID NO: 17629 - DNA, 19 bp, Homo sapiens
tggtgaggcttaaggagga

SEQ ID NO: 17630 - DNA, 19 bp, Homo sapiens
ggtgaggcttaaggaggta

SEQ ID NO: 17631 - DNA, 19 bp, Homo sapiens
gtgaggcttaaggaggtca

SEQ ID NO: 17632 - DNA, 19 bp, Homo sapiens
tgaggcttaaggaggtcca

SEQ ID NO: 17633 - DNA, 19 bp, Homo sapiens
aggcttaaggaggtccgaa

SEQ ID NO: 17634 - DNA, 19 bp, Homo sapiens
ggcttaaggaggtccgaca

SEQ ID NO: 17635 - DNA, 19 bp, Homo sapiens
gcttaaggaggtccgacta

SEQ ID NO: 17636 - DNA, 19 bp, Homo sapiens
cttaaggaggtccgactga

SEQ ID NO: 17637 - DNA, 19 bp, Homo sapiens
taaggaggtccgactgcaa

SEQ ID NO: 17638 - DNA, 19 bp, Homo sapiens
aggaggtccgactgcagaa

SEQ ID NO: 17639 - DNA, 19 bp, Homo sapiens
ggaggtccgactgcagaga

SEQ ID NO: 17640 - DNA, 19 bp, Homo sapiens
gaggtccgactgcagagga

SEQ ID NO: 17641 - DNA, 19 bp, Homo sapiens
ggtccgactgcagagggaa

SEQ ID NO: 17642 - DNA, 19 bp, Homo sapiens
gtccgactgcagagggaca

SEQ ID NO: 17643 - DNA, 19 bp, Homo sapiens
ccgactgcagagggacgaa

SEQ ID NO: 17644 - DNA, 19 bp, Homo sapiens
cgactgcagagggacgaca

SEQ ID NO: 17645 - DNA, 19 bp, Homo sapiens
gactgcagagggacgacta

SEQ ID NO: 17646 - DNA, 19 bp, Homo sapiens
actgcagagggacgactta

SEQ ID NO: 17647 - DNA, 19 bp, Homo sapiens
ctgcagagggacgacttca

SEQ ID NO: 17648 - DNA, 19 bp, Homo sapiens
gcagagggacgacttcgaa

SEQ ID NO: 17649 - DNA, 19 bp, Homo sapiens
agagggacgacttcgagaa

SEQ ID NO: 17650 - DNA, 19 bp, Homo sapiens
gagggacgacttcgagata

SEQ ID NO: 17651 - DNA, 19 bp, Homo sapiens
agggacgacttcgagatta

SEQ ID NO: 17652 - DNA, 19 bp, Homo sapiens
gggacgacttcgagattca

SEQ ID NO: 17653 - DNA, 19 bp, Homo sapiens
ggacgacttcgagattcta

SEQ ID NO: 17654 - DNA, 19 bp, Homo sapiens
cgacttcgagattctgaaa

SEQ ID NO: 17655 - DNA, 19 bp, Homo sapiens
gacttcgagattctgaaga

SEQ ID NO: 17656 - DNA, 19 bp, Homo sapiens
acttcgagattctgaagga

SEQ ID NO: 17657 - DNA, 19 bp, Homo sapiens
cttcgagattctgaaggta

SEQ ID NO: 17658 - DNA, 19 bp, Homo sapiens
tcgagattctgaaggtgaa

SEQ ID NO: 17659 - DNA, 19 bp, Homo sapiens
cgagattctgaaggtgata

SEQ ID NO: 17660 - DNA, 19 bp, Homo sapiens
gagattctgaaggtgatca

SEQ ID NO: 17661 - DNA, 19 bp, Homo sapiens
agattctgaaggtgatcga

SEQ ID NO: 17662 - DNA, 19 bp, Homo sapiens
attctgaaggtgatcggaa

SEQ ID NO: 17663 - DNA, 19 bp, Homo sapiens
ttctgaaggtgatcggaca

SEQ ID NO: 17664 - DNA, 19 bp, Homo sapiens
tctgaaggtgatcggacga

SEQ ID NO: 17665 - DNA, 19 bp, Homo sapiens
ctgaaggtgatcggacgca

SEQ ID NO: 17666 - DNA, 19 bp, Homo sapiens
tgaaggtgatcggacgcga

SEQ ID NO: 17667 - DNA, 19 bp, Homo sapiens
gaaggtgatcggacgcgga

SEQ ID NO: 17668 - DNA, 19 bp, Homo sapiens
aaggtgatcggacgcggga

SEQ ID NO: 17669 - DNA, 19 bp, Homo sapiens
aggtgatcggacgcgggga

SEQ ID NO: 17670 - DNA, 19 bp, Homo sapiens
ggtgatcggacgcggggca

SEQ ID NO: 17671 - DNA, 19 bp, Homo sapiens
gtgatcggacgcggggcga

SEQ ID NO: 17672 - DNA, 19 bp, Homo sapiens
tgatcggacgcggggcgta

SEQ ID NO: 17673 - DNA, 19 bp, Homo sapiens
gatcggacgcggggcgtta

SEQ ID NO: 17674 - DNA, 19 bp, Homo sapiens
tcggacgcggggcgttcaa

SEQ ID NO: 17675 - DNA, 19 bp, Homo sapiens
cggacgcggggcgttcaga

SEQ ID NO: 17676 - DNA, 19 bp, Homo sapiens
ggacgcggggcgttcagca

SEQ ID NO: 17677 - DNA, 19 bp, Homo sapiens
acgcggggcgttcagcgaa

SEQ ID NO: 17678 - DNA, 19 bp, Homo sapiens
cgcggggcgttcagcgaga

SEQ ID NO: 17679 - DNA, 19 bp, Homo sapiens
gcggggcgttcagcgagga

SEQ ID NO: 17680 - DNA, 19 bp, Homo sapiens
ggggcgttcagcgaggtaa

SEQ ID NO: 17681 - DNA, 19 bp, Homo sapiens
gggcgttcagcgaggtaga

SEQ ID NO: 17682 - DNA, 19 bp, Homo sapiens
ggcgttcagcgaggtagca

SEQ ID NO: 17683 - DNA, 19 bp, Homo sapiens
gcgttcagcgaggtagcga

SEQ ID NO: 17684 - DNA, 19 bp, Homo sapiens
cgttcagcgaggtagcgga

SEQ ID NO: 17685 - DNA, 19 bp, Homo sapiens
ttcagcgaggtagcggtaa

SEQ ID NO: 17686 - DNA, 19 bp, Homo sapiens
tcagcgaggtagcggtaga

SEQ ID NO: 17687 - DNA, 19 bp, Homo sapiens
cagcgaggtagcggtagta

SEQ ID NO: 17688 - DNA, 19 bp, Homo sapiens
cgaggtagcggtagtgaaa

SEQ ID NO: 17689 - DNA, 19 bp, Homo sapiens
aggtagcggtagtgaagaa

SEQ ID NO: 17690 - DNA, 19 bp, Homo sapiens
ggtagcggtagtgaagata

SEQ ID NO: 17691 - DNA, 19 bp, Homo sapiens
agcggtagtgaagatgaaa

SEQ ID NO: 17692 - DNA, 19 bp, Homo sapiens
gcggtagtgaagatgaaga

SEQ ID NO: 17693 - DNA, 19 bp, Homo sapiens
ggtagtgaagatgaagcaa

SEQ ID NO: 17694 - DNA, 19 bp, Homo sapiens
tagtgaagatgaagcagaa

SEQ ID NO: 17695 - DNA, 19 bp, Homo sapiens
agtgaagatgaagcagaca

SEQ ID NO: 17696 - DNA, 19 bp, Homo sapiens
gtgaagatgaagcagacga

SEQ ID NO: 17697 - DNA, 19 bp, Homo sapiens
tgaagatgaagcagacgga

SEQ ID NO: 17698 - DNA, 19 bp, Homo sapiens
gaagatgaagcagacggga

SEQ ID NO: 17699 - DNA, 19 bp, Homo sapiens
aagatgaagcagacgggca

SEQ ID NO: 17700 - DNA, 19 bp, Homo sapiens
gatgaagcagacgggccaa

SEQ ID NO: 17701 - DNA, 19 bp, Homo sapiens
atgaagcagacgggccaga

SEQ ID NO: 17702 - DNA, 19 bp, Homo sapiens
tgaagcagacgggccagga

SEQ ID NO: 17703 - DNA, 19 bp, Homo sapiens
gaagcagacgggccaggta

SEQ ID NO: 17704 - DNA, 19 bp, Homo sapiens
aagcagacgggccaggtga

SEQ ID NO: 17705 - DNA, 19 bp, Homo sapiens
gcagacgggccaggtgtaa

SEQ ID NO: 17706 - DNA, 19 bp, Homo sapiens
cagacgggccaggtgtata

SEQ ID NO: 17707 - DNA, 19 bp, Homo sapiens
agacgggccaggtgtatga

SEQ ID NO: 17708 - DNA, 19 bp, Homo sapiens
gacgggccaggtgtatgca

SEQ ID NO: 17709 - DNA, 19 bp, Homo sapiens
cgggccaggtgtatgccaa

SEQ ID NO: 17710 - DNA, 19 bp, Homo sapiens
gggccaggtgtatgccata

SEQ ID NO: 17711 - DNA, 19 bp, Homo sapiens
ccaggtgtatgccatgaaa

SEQ ID NO: 17712 - DNA, 19 bp, Homo sapiens
aggtgtatgccatgaagaa

SEQ ID NO: 17713 - DNA, 19 bp, Homo sapiens
ggtgtatgccatgaagata

SEQ ID NO: 17714 - DNA, 19 bp, Homo sapiens
tgtatgccatgaagatcaa

SEQ ID NO: 17715 - DNA, 19 bp, Homo sapiens
gtatgccatgaagatcata

SEQ ID NO: 17716 - DNA, 19 bp, Homo sapiens
tgccatgaagatcatgaaa

SEQ ID NO: 17717 - DNA, 19 bp, Homo sapiens
catgaagatcatgaacaaa

SEQ ID NO: 17718 - DNA, 19 bp, Homo sapiens
atgaagatcatgaacaaga

SEQ ID NO: 17719 - DNA, 19 bp, Homo sapiens
tgaagatcatgaacaagta

SEQ ID NO: 17720 - DNA, 19 bp, Homo sapiens
gaagatcatgaacaagtga

SEQ ID NO: 17721 - DNA, 19 bp, Homo sapiens
aagatcatgaacaagtgga

SEQ ID NO: 17722 - DNA, 19 bp, Homo sapiens
gatcatgaacaagtgggaa

SEQ ID NO: 17723 - DNA, 19 bp, Homo sapiens
tcatgaacaagtgggacaa

SEQ ID NO: 17724 - DNA, 19 bp, Homo sapiens
catgaacaagtgggacata

SEQ ID NO: 17725 - DNA, 19 bp, Homo sapiens
atgaacaagtgggacatga

SEQ ID NO: 17726 - DNA, 19 bp, Homo sapiens
tgaacaagtgggacatgca

SEQ ID NO: 17727 - DNA, 19 bp, Homo sapiens
gaacaagtgggacatgcta

SEQ ID NO: 17728 - DNA, 19 bp, Homo sapiens
caagtgggacatgctgaaa

SEQ ID NO: 17729 - DNA, 19 bp, Homo sapiens
agtgggacatgctgaagaa

SEQ ID NO: 17730 - DNA, 19 bp, Homo sapiens
gtgggacatgctgaagaga

SEQ ID NO: 17731 - DNA, 19 bp, Homo sapiens
tgggacatgctgaagagga

SEQ ID NO: 17732 - DNA, 19 bp, Homo sapiens
gggacatgctgaagaggga

SEQ ID NO: 17733 - DNA, 19 bp, Homo sapiens
ggacatgctgaagagggga

SEQ ID NO: 17734 - DNA, 19 bp, Homo sapiens
gacatgctgaagaggggca

SEQ ID NO: 17735 - DNA, 19 bp, Homo sapiens
catgctgaagaggggcgaa

SEQ ID NO: 17736 - DNA, 19 bp, Homo sapiens
atgctgaagaggggcgaga

SEQ ID NO: 17737 - DNA, 19 bp, Homo sapiens
tgctgaagaggggcgagga

SEQ ID NO: 17738 - DNA, 19 bp, Homo sapiens
gctgaagaggggcgaggta

SEQ ID NO: 17739 - DNA, 19 bp, Homo sapiens
ctgaagaggggcgaggtga

SEQ ID NO: 17740 - DNA, 19 bp, Homo sapiens
tgaagaggggcgaggtgta

SEQ ID NO: 17741 - DNA, 19 bp, Homo sapiens
gaagaggggcgaggtgtca

SEQ ID NO: 17742 - DNA, 19 bp, Homo sapiens
aagaggggcgaggtgtcga

SEQ ID NO: 17743 - DNA, 19 bp, Homo sapiens
agaggggcgaggtgtcgta

SEQ ID NO: 17744 - DNA, 19 bp, Homo sapiens
gaggggcgaggtgtcgtga

SEQ ID NO: 17745 - DNA, 19 bp, Homo sapiens
aggggcgaggtgtcgtgca

SEQ ID NO: 17746 - DNA, 19 bp, Homo sapiens
ggggcgaggtgtcgtgcta

SEQ ID NO: 17747 - DNA, 19 bp, Homo sapiens
gggcgaggtgtcgtgctta

SEQ ID NO: 17748 - DNA, 19 bp, Homo sapiens
ggcgaggtgtcgtgcttca

SEQ ID NO: 17749 - DNA, 19 bp, Homo sapiens
gcgaggtgtcgtgcttcca

SEQ ID NO: 17750 - DNA, 19 bp, Homo sapiens
cgaggtgtcgtgcttccga

SEQ ID NO: 17751 - DNA, 19 bp, Homo sapiens
gaggtgtcgtgcttccgta

SEQ ID NO: 17752 - DNA, 19 bp, Homo sapiens
ggtgtcgtgcttccgtgaa

SEQ ID NO: 17753 - DNA, 19 bp, Homo sapiens
gtgtcgtgcttccgtgaga

SEQ ID NO: 17754 - DNA, 19 bp, Homo sapiens
gtcgtgcttccgtgaggaa

SEQ ID NO: 17755 - DNA, 19 bp, Homo sapiens
cgtgcttccgtgaggagaa

SEQ ID NO: 17756 - DNA, 19 bp, Homo sapiens
gtgcttccgtgaggagaga

SEQ ID NO: 17757 - DNA, 19 bp, Homo sapiens
tgcttccgtgaggagagga

SEQ ID NO: 17758 - DNA, 19 bp, Homo sapiens
cttccgtgaggagagggaa

SEQ ID NO: 17759 - DNA, 19 bp, Homo sapiens
ttccgtgaggagagggaca

SEQ ID NO: 17760 - DNA, 19 bp, Homo sapiens
tccgtgaggagagggacga

SEQ ID NO: 17761 - DNA, 19 bp, Homo sapiens
ccgtgaggagagggacgta

SEQ ID NO: 17762 - DNA, 19 bp, Homo sapiens
cgtgaggagagggacgtga

SEQ ID NO: 17763 - DNA, 19 bp, Homo sapiens
gtgaggagagggacgtgta

SEQ ID NO: 17764 - DNA, 19 bp, Homo sapiens
tgaggagagggacgtgtta

SEQ ID NO: 17765 - DNA, 19 bp, Homo sapiens
gaggagagggacgtgttga

SEQ ID NO: 17766 - DNA, 19 bp, Homo sapiens
aggagagggacgtgttgga

SEQ ID NO: 17767 - DNA, 19 bp, Homo sapiens
ggagagggacgtgttggta

SEQ ID NO: 17768 - DNA, 19 bp, Homo sapiens
gagggacgtgttggtgaaa

SEQ ID NO: 17769 - DNA, 19 bp, Homo sapiens
agggacgtgttggtgaata

SEQ ID NO: 17770 - DNA, 19 bp, Homo sapiens
gggacgtgttggtgaatga

SEQ ID NO: 17771 - DNA, 19 bp, Homo sapiens
ggacgtgttggtgaatgga

SEQ ID NO: 17772 - DNA, 19 bp, Homo sapiens
gacgtgttggtgaatggga

SEQ ID NO: 17773 - DNA, 19 bp, Homo sapiens
cgtgttggtgaatggggaa

SEQ ID NO: 17774 - DNA, 19 bp, Homo sapiens
gtgttggtgaatggggaca

SEQ ID NO: 17775 - DNA, 19 bp, Homo sapiens
tgttggtgaatggggacca

SEQ ID NO: 17776 - DNA, 19 bp, Homo sapiens
gttggtgaatggggaccga

SEQ ID NO: 17777 - DNA, 19 bp, Homo sapiens
ttggtgaatggggaccgga

SEQ ID NO: 17778 - DNA, 19 bp, Homo sapiens
tggtgaatggggaccggca

SEQ ID NO: 17779 - DNA, 19 bp, Homo sapiens
ggtgaatggggaccggcga

SEQ ID NO: 17780 - DNA, 19 bp, Homo sapiens
gtgaatggggaccggcgga

SEQ ID NO: 17781 - DNA, 19 bp, Homo sapiens
tgaatggggaccggcggta

SEQ ID NO: 17782 - DNA, 19 bp, Homo sapiens
gaatggggaccggcggtga

SEQ ID NO: 17783 - DNA, 19 bp, Homo sapiens
atggggaccggcggtggaa

SEQ ID NO: 17784 - DNA, 19 bp, Homo sapiens
tggggaccggcggtggata

SEQ ID NO: 17785 - DNA, 19 bp, Homo sapiens
gggaccggcggtggatcaa

SEQ ID NO: 17786 - DNA, 19 bp, Homo sapiens
ggaccggcggtggatcaca

SEQ ID NO: 17787 - DNA, 19 bp, Homo sapiens
gaccggcggtggatcacga

SEQ ID NO: 17788 - DNA, 19 bp, Homo sapiens
ccggcggtggatcacgcaa

SEQ ID NO: 17789 - DNA, 19 bp, Homo sapiens
cggcggtggatcacgcaga

SEQ ID NO: 17790 - DNA, 19 bp, Homo sapiens
ggcggtggatcacgcagca

SEQ ID NO: 17791 - DNA, 19 bp, Homo sapiens
gcggtggatcacgcagcta

SEQ ID NO: 17792 - DNA, 19 bp, Homo sapiens
cggtggatcacgcagctga

SEQ ID NO: 17793 - DNA, 19 bp, Homo sapiens
gtggatcacgcagctgcaa

SEQ ID NO: 17794 - DNA, 19 bp, Homo sapiens
tggatcacgcagctgcaca

SEQ ID NO: 17795 - DNA, 19 bp, Homo sapiens
ggatcacgcagctgcacta

SEQ ID NO: 17796 - DNA, 19 bp, Homo sapiens
gatcacgcagctgcactta

SEQ ID NO: 17797 - DNA, 19 bp, Homo sapiens
atcacgcagctgcacttca

SEQ ID NO: 17798 - DNA, 19 bp, Homo sapiens
tcacgcagctgcacttcga

SEQ ID NO: 17799 - DNA, 19 bp, Homo sapiens
cacgcagctgcacttcgca

SEQ ID NO: 17800 - DNA, 19 bp, Homo sapiens
acgcagctgcacttcgcca

SEQ ID NO: 17801 - DNA, 19 bp, Homo sapiens
cgcagctgcacttcgccta

SEQ ID NO: 17802 - DNA, 19 bp, Homo sapiens
gcagctgcacttcgcctta

SEQ ID NO: 17803 - DNA, 19 bp, Homo sapiens
cagctgcacttcgccttca

SEQ ID NO: 17804 - DNA, 19 bp, Homo sapiens
gctgcacttcgccttccaa

SEQ ID NO: 17805 - DNA, 19 bp, Homo sapiens
ctgcacttcgccttccaga

SEQ ID NO: 17806 - DNA, 19 bp, Homo sapiens
gcacttcgccttccaggaa

SEQ ID NO: 17807 - DNA, 19 bp, Homo sapiens
cacttcgccttccaggata

SEQ ID NO: 17808 - DNA, 19 bp, Homo sapiens
cttcgccttccaggatgaa

SEQ ID NO: 17809 - DNA, 19 bp, Homo sapiens
cgccttccaggatgagaaa

SEQ ID NO: 17810 - DNA, 19 bp, Homo sapiens
gccttccaggatgagaaca

SEQ ID NO: 17811 - DNA, 19 bp, Homo sapiens
cttccaggatgagaactaa

SEQ ID NO: 17812 - DNA, 19 bp, Homo sapiens
ttccaggatgagaactaca

SEQ ID NO: 17813 - DNA, 19 bp, Homo sapiens
tccaggatgagaactacca

SEQ ID NO: 17814 - DNA, 19 bp, Homo sapiens
ccaggatgagaactaccta

SEQ ID NO: 17815 - DNA, 19 bp, Homo sapiens
caggatgagaactacctga

SEQ ID NO: 17816 - DNA, 19 bp, Homo sapiens
ggatgagaactacctgtaa

SEQ ID NO: 17817 - DNA, 19 bp, Homo sapiens
gatgagaactacctgtaca

SEQ ID NO: 17818 - DNA, 19 bp, Homo sapiens
atgagaactacctgtacca

SEQ ID NO: 17819 - DNA, 19 bp, Homo sapiens
tgagaactacctgtaccta

SEQ ID NO: 17820 - DNA, 19 bp, Homo sapiens
gagaactacctgtacctga

SEQ ID NO: 17821 - DNA, 19 bp, Homo sapiens
agaactacctgtacctgga

SEQ ID NO: 17822 - DNA, 19 bp, Homo sapiens
gaactacctgtacctggta

SEQ ID NO: 17823 - DNA, 19 bp, Homo sapiens
actacctgtacctggtcaa

SEQ ID NO: 17824 - DNA, 19 bp, Homo sapiens
ctacctgtacctggtcata

SEQ ID NO: 17825 - DNA, 19 bp, Homo sapiens
tacctgtacctggtcatga

SEQ ID NO: 17826 - DNA, 19 bp, Homo sapiens
cctgtacctggtcatggaa

SEQ ID NO: 17827 - DNA, 19 bp, Homo sapiens
ctgtacctggtcatggaga

SEQ ID NO: 17828 - DNA, 19 bp, Homo sapiens
gtacctggtcatggagtaa

SEQ ID NO: 17829 - DNA, 19 bp, Homo sapiens
tacctggtcatggagtata

SEQ ID NO: 17830 - DNA, 19 bp, Homo sapiens
cctggtcatggagtattaa

SEQ ID NO: 17831 - DNA, 19 bp, Homo sapiens
ctggtcatggagtattaca

SEQ ID NO: 17832 - DNA, 19 bp, Homo sapiens
tggtcatggagtattacga

SEQ ID NO: 17833 - DNA, 19 bp, Homo sapiens
ggtcatggagtattacgta

SEQ ID NO: 17834 - DNA, 19 bp, Homo sapiens
gtcatggagtattacgtga

SEQ ID NO: 17835 - DNA, 19 bp, Homo sapiens
tcatggagtattacgtgga

SEQ ID NO: 17836 - DNA, 19 bp, Homo sapiens
catggagtattacgtggga

SEQ ID NO: 17837 - DNA, 19 bp, Homo sapiens
atggagtattacgtgggca

SEQ ID NO: 17838 - DNA, 19 bp, Homo sapiens
tggagtattacgtgggcga

SEQ ID NO: 17839 - DNA, 19 bp, Homo sapiens
ggagtattacgtgggcgga

SEQ ID NO: 17840 - DNA, 19 bp, Homo sapiens
gagtattacgtgggcggga

SEQ ID NO: 17841 - DNA, 19 bp, Homo sapiens
gtattacgtgggcggggaa

SEQ ID NO: 17842 - DNA, 19 bp, Homo sapiens
tattacgtgggcggggaca

SEQ ID NO: 17843 - DNA, 19 bp, Homo sapiens
attacgtgggcggggacca

SEQ ID NO: 17844 - DNA, 19 bp, Homo sapiens
ttacgtgggcggggaccta

SEQ ID NO: 17845 - DNA, 19 bp, Homo sapiens
tacgtgggcggggacctga

SEQ ID NO: 17846 - DNA, 19 bp, Homo sapiens
acgtgggcggggacctgca

SEQ ID NO: 17847 - DNA, 19 bp, Homo sapiens
cgtgggcggggacctgcta

SEQ ID NO: 17848 - DNA, 19 bp, Homo sapiens
tgggcggggacctgctgaa

SEQ ID NO: 17849 - DNA, 19 bp, Homo sapiens
ggcggggacctgctgacaa

SEQ ID NO: 17850 - DNA, 19 bp, Homo sapiens
gcggggacctgctgacaca

SEQ ID NO: 17851 - DNA, 19 bp, Homo sapiens
cggggacctgctgacacta

SEQ ID NO: 17852 - DNA, 19 bp, Homo sapiens
ggggacctgctgacactga

SEQ ID NO: 17853 - DNA, 19 bp, Homo sapiens
gggacctgctgacactgca

SEQ ID NO: 17854 - DNA, 19 bp, Homo sapiens
ggacctgctgacactgcta

SEQ ID NO: 17855 - DNA, 19 bp, Homo sapiens
acctgctgacactgctgaa

SEQ ID NO: 17856 - DNA, 19 bp, Homo sapiens
cctgctgacactgctgaga

SEQ ID NO: 17857 - DNA, 19 bp, Homo sapiens
gctgacactgctgagcaaa

SEQ ID NO: 17858 - DNA, 19 bp, Homo sapiens
ctgacactgctgagcaaga

SEQ ID NO: 17859 - DNA, 19 bp, Homo sapiens
tgacactgctgagcaagta

SEQ ID NO: 17860 - DNA, 19 bp, Homo sapiens
gacactgctgagcaagtta

SEQ ID NO: 17861 - DNA, 19 bp, Homo sapiens
acactgctgagcaagttta

SEQ ID NO: 17862 - DNA, 19 bp, Homo sapiens
cactgctgagcaagtttga

SEQ ID NO: 17863 - DNA, 19 bp, Homo sapiens
actgctgagcaagtttgga

SEQ ID NO: 17864 - DNA, 19 bp, Homo sapiens
ctgctgagcaagtttggga

SEQ ID NO: 17865 - DNA, 19 bp, Homo sapiens
gctgagcaagtttggggaa

SEQ ID NO: 17866 - DNA, 19 bp, Homo sapiens
ctgagcaagtttggggaga

SEQ ID NO: 17867 - DNA, 19 bp, Homo sapiens
tgagcaagtttggggagca

SEQ ID NO: 17868 - DNA, 19 bp, Homo sapiens
gagcaagtttggggagcga

SEQ ID NO: 17869 - DNA, 19 bp, Homo sapiens
gcaagtttggggagcggaa

SEQ ID NO: 17870 - DNA, 19 bp, Homo sapiens
caagtttggggagcggata

SEQ ID NO: 17871 - DNA, 19 bp, Homo sapiens
aagtttggggagcggatta

SEQ ID NO: 17872 - DNA, 19 bp, Homo sapiens
agtttggggagcggattca

SEQ ID NO: 17873 - DNA, 19 bp, Homo sapiens
gtttggggagcggattcca

SEQ ID NO: 17874 - DNA, 19 bp, Homo sapiens
tttggggagcggattccga

SEQ ID NO: 17875 - DNA, 19 bp, Homo sapiens
ttggggagcggattccgga

SEQ ID NO: 17876 - DNA, 19 bp, Homo sapiens
tggggagcggattccggca

SEQ ID NO: 17877 - DNA, 19 bp, Homo sapiens
ggggagcggattccggcca

SEQ ID NO: 17878 - DNA, 19 bp, Homo sapiens
ggagcggattccggccgaa

SEQ ID NO: 17879 - DNA, 19 bp, Homo sapiens
agcggattccggccgagaa

SEQ ID NO: 17880 - DNA, 19 bp, Homo sapiens
gcggattccggccgagata

SEQ ID NO: 17881 - DNA, 19 bp, Homo sapiens
cggattccggccgagatga

SEQ ID NO: 17882 - DNA, 19 bp, Homo sapiens
ggattccggccgagatgga

SEQ ID NO: 17883 - DNA, 19 bp, Homo sapiens
gattccggccgagatggca

SEQ ID NO: 17884 - DNA, 19 bp, Homo sapiens
attccggccgagatggcga

SEQ ID NO: 17885 - DNA, 19 bp, Homo sapiens
ttccggccgagatggcgca

SEQ ID NO: 17886 - DNA, 19 bp, Homo sapiens
tccggccgagatggcgcga

SEQ ID NO: 17887 - DNA, 19 bp, Homo sapiens
ccggccgagatggcgcgca

SEQ ID NO: 17888 - DNA, 19 bp, Homo sapiens
cggccgagatggcgcgcta

SEQ ID NO: 17889 - DNA, 19 bp, Homo sapiens
ggccgagatggcgcgctta

SEQ ID NO: 17890 - DNA, 19 bp, Homo sapiens
gccgagatggcgcgcttca

SEQ ID NO: 17891 - DNA, 19 bp, Homo sapiens
cgagatggcgcgcttctaa

SEQ ID NO: 17892 - DNA, 19 bp, Homo sapiens
gagatggcgcgcttctaca

SEQ ID NO: 17893 - DNA, 19 bp, Homo sapiens
agatggcgcgcttctacca

SEQ ID NO: 17894 - DNA, 19 bp, Homo sapiens
gatggcgcgcttctaccta

SEQ ID NO: 17895 - DNA, 19 bp, Homo sapiens
atggcgcgcttctacctga

SEQ ID NO: 17896 - DNA, 19 bp, Homo sapiens
tggcgcgcttctacctgga

SEQ ID NO: 17897 - DNA, 19 bp, Homo sapiens
ggcgcgcttctacctggca

SEQ ID NO: 17898 - DNA, 19 bp, Homo sapiens
gcgcgcttctacctggcga

SEQ ID NO: 17899 - DNA, 19 bp, Homo sapiens
gcgcttctacctggcggaa

SEQ ID NO: 17900 - DNA, 19 bp, Homo sapiens
gcttctacctggcggagaa

SEQ ID NO: 17901 - DNA, 19 bp, Homo sapiens
cttctacctggcggagata

SEQ ID NO: 17902 - DNA, 19 bp, Homo sapiens
ttctacctggcggagatta

SEQ ID NO: 17903 - DNA, 19 bp, Homo sapiens
tctacctggcggagattga

SEQ ID NO: 17904 - DNA, 19 bp, Homo sapiens
ctacctggcggagattgta

SEQ ID NO: 17905 - DNA, 19 bp, Homo sapiens
acctggcggagattgtcaa

SEQ ID NO: 17906 - DNA, 19 bp, Homo sapiens
cctggcggagattgtcata

SEQ ID NO: 17907 - DNA, 19 bp, Homo sapiens
ctggcggagattgtcatga

SEQ ID NO: 17908 - DNA, 19 bp, Homo sapiens
tggcggagattgtcatgga

SEQ ID NO: 17909 - DNA, 19 bp, Homo sapiens
ggcggagattgtcatggca

SEQ ID NO: 17910 - DNA, 19 bp, Homo sapiens
cggagattgtcatggccaa

SEQ ID NO: 17911 - DNA, 19 bp, Homo sapiens
gagattgtcatggccataa

SEQ ID NO: 17912 - DNA, 19 bp, Homo sapiens
gattgtcatggccatagaa

SEQ ID NO: 17913 - DNA, 19 bp, Homo sapiens
attgtcatggccatagaca

SEQ ID NO: 17914 - DNA, 19 bp, Homo sapiens
ttgtcatggccatagacta

SEQ ID NO: 17915 - DNA, 19 bp, Homo sapiens
tgtcatggccatagactca

SEQ ID NO: 17916 - DNA, 19 bp, Homo sapiens
gtcatggccatagactcga

SEQ ID NO: 17917 - DNA, 19 bp, Homo sapiens
tcatggccatagactcgga

SEQ ID NO: 17918 - DNA, 19 bp, Homo sapiens
catggccatagactcggta

SEQ ID NO: 17919 - DNA, 19 bp, Homo sapiens
atggccatagactcggtga

SEQ ID NO: 17920 - DNA, 19 bp, Homo sapiens
ggccatagactcggtgcaa

SEQ ID NO: 17921 - DNA, 19 bp, Homo sapiens
gccatagactcggtgcaca

SEQ ID NO: 17922 - DNA, 19 bp, Homo sapiens
ccatagactcggtgcacca

SEQ ID NO: 17923 - DNA, 19 bp, Homo sapiens
catagactcggtgcaccga

SEQ ID NO: 17924 - DNA, 19 bp, Homo sapiens
atagactcggtgcaccgga

SEQ ID NO: 17925 - DNA, 19 bp, Homo sapiens
tagactcggtgcaccggca

SEQ ID NO: 17926 - DNA, 19 bp, Homo sapiens
agactcggtgcaccggcta

SEQ ID NO: 17927 - DNA, 19 bp, Homo sapiens
gactcggtgcaccggctta

SEQ ID NO: 17928 - DNA, 19 bp, Homo sapiens
actcggtgcaccggcttga

SEQ ID NO: 17929 - DNA, 19 bp, Homo sapiens
ctcggtgcaccggcttgga

SEQ ID NO: 17930 - DNA, 19 bp, Homo sapiens
tcggtgcaccggcttggca

SEQ ID NO: 17931 - DNA, 19 bp, Homo sapiens
ggtgcaccggcttggctaa

SEQ ID NO: 17932 - DNA, 19 bp, Homo sapiens
gtgcaccggcttggctaca

SEQ ID NO: 17933 - DNA, 19 bp, Homo sapiens
tgcaccggcttggctacga

SEQ ID NO: 17934 - DNA, 19 bp, Homo sapiens
gcaccggcttggctacgta

SEQ ID NO: 17935 - DNA, 19 bp, Homo sapiens
caccggcttggctacgtga

SEQ ID NO: 17936 - DNA, 19 bp, Homo sapiens
ccggcttggctacgtgcaa

SEQ ID NO: 17937 - DNA, 19 bp, Homo sapiens
ggcttggctacgtgcacaa

SEQ ID NO: 17938 - DNA, 19 bp, Homo sapiens
gcttggctacgtgcacaga

SEQ ID NO: 17939 - DNA, 19 bp, Homo sapiens
cttggctacgtgcacagga

SEQ ID NO: 17940 - DNA, 19 bp, Homo sapiens
tggctacgtgcacagggaa

SEQ ID NO: 17941 - DNA, 19 bp, Homo sapiens
gctacgtgcacagggacaa

SEQ ID NO: 17942 - DNA, 19 bp, Homo sapiens
ctacgtgcacagggacata

SEQ ID NO: 17943 - DNA, 19 bp, Homo sapiens
gtgcacagggacatcaaaa

SEQ ID NO: 17944 - DNA, 19 bp, Homo sapiens
tgcacagggacatcaaaca

SEQ ID NO: 17945 - DNA, 19 bp, Homo sapiens
gcacagggacatcaaacca

SEQ ID NO: 17946 - DNA, 19 bp, Homo sapiens
cacagggacatcaaaccca

SEQ ID NO: 17947 - DNA, 19 bp, Homo sapiens
cagggacatcaaacccgaa

SEQ ID NO: 17948 - DNA, 19 bp, Homo sapiens
ggacatcaaacccgacaaa

SEQ ID NO: 17949 - DNA, 19 bp, Homo sapiens
acatcaaacccgacaacaa

SEQ ID NO: 17950 - DNA, 19 bp, Homo sapiens
catcaaacccgacaacata

SEQ ID NO: 17951 - DNA, 19 bp, Homo sapiens
atcaaacccgacaacatca

SEQ ID NO: 17952 - DNA, 19 bp, Homo sapiens
tcaaacccgacaacatcca

SEQ ID NO: 17953 - DNA, 19 bp, Homo sapiens
caaacccgacaacatccta

SEQ ID NO: 17954 - DNA, 19 bp, Homo sapiens
aaacccgacaacatcctga

SEQ ID NO: 17955 - DNA, 19 bp, Homo sapiens
aacccgacaacatcctgca

SEQ ID NO: 17956 - DNA, 19 bp, Homo sapiens
acccgacaacatcctgcta

SEQ ID NO: 17957 - DNA, 19 bp, Homo sapiens
cccgacaacatcctgctga

SEQ ID NO: 17958 - DNA, 19 bp, Homo sapiens
cgacaacatcctgctggaa

SEQ ID NO: 17959 - DNA, 19 bp, Homo sapiens
gacaacatcctgctggaca

SEQ ID NO: 17960 - DNA, 19 bp, Homo sapiens
acaacatcctgctggacca

SEQ ID NO: 17961 - DNA, 19 bp, Homo sapiens
caacatcctgctggaccga

SEQ ID NO: 17962 - DNA, 19 bp, Homo sapiens
aacatcctgctggaccgca

SEQ ID NO: 17963 - DNA, 19 bp, Homo sapiens
acatcctgctggaccgcta

SEQ ID NO: 17964 - DNA, 19 bp, Homo sapiens
catcctgctggaccgctga

SEQ ID NO: 17965 - DNA, 19 bp, Homo sapiens
atcctgctggaccgctgta

SEQ ID NO: 17966 - DNA, 19 bp, Homo sapiens
tcctgctggaccgctgtga

SEQ ID NO: 17967 - DNA, 19 bp, Homo sapiens
cctgctggaccgctgtgga

SEQ ID NO: 17968 - DNA, 19 bp, Homo sapiens
ctgctggaccgctgtggca

SEQ ID NO: 17969 - DNA, 19 bp, Homo sapiens
gctggaccgctgtggccaa

SEQ ID NO: 17970 - DNA, 19 bp, Homo sapiens
tggaccgctgtggccacaa

SEQ ID NO: 17971 - DNA, 19 bp, Homo sapiens
ggaccgctgtggccacata

SEQ ID NO: 17972 - DNA, 19 bp, Homo sapiens
gaccgctgtggccacatca

SEQ ID NO: 17973 - DNA, 19 bp, Homo sapiens
accgctgtggccacatcca

SEQ ID NO: 17974 - DNA, 19 bp, Homo sapiens
ccgctgtggccacatccga

SEQ ID NO: 17975 - DNA, 19 bp, Homo sapiens
cgctgtggccacatccgca

SEQ ID NO: 17976 - DNA, 19 bp, Homo sapiens
gctgtggccacatccgcca

SEQ ID NO: 17977 - DNA, 19 bp, Homo sapiens
ctgtggccacatccgccta

SEQ ID NO: 17978 - DNA, 19 bp, Homo sapiens
tgtggccacatccgcctga

SEQ ID NO: 17979 - DNA, 19 bp, Homo sapiens
gtggccacatccgcctgga

SEQ ID NO: 17980 - DNA, 19 bp, Homo sapiens
tggccacatccgcctggca

SEQ ID NO: 17981 - DNA, 19 bp, Homo sapiens
ggccacatccgcctggcca

SEQ ID NO: 17982 - DNA, 19 bp, Homo sapiens
ccacatccgcctggccgaa

SEQ ID NO: 17983 - DNA, 19 bp, Homo sapiens
cacatccgcctggccgaca

SEQ ID NO: 17984 - DNA, 19 bp, Homo sapiens
acatccgcctggccgacta

SEQ ID NO: 17985 - DNA, 19 bp, Homo sapiens
catccgcctggccgactta

SEQ ID NO: 17986 - DNA, 19 bp, Homo sapiens
atccgcctggccgacttca

SEQ ID NO: 17987 - DNA, 19 bp, Homo sapiens
tccgcctggccgacttcga

SEQ ID NO: 17988 - DNA, 19 bp, Homo sapiens
ccgcctggccgacttcgga

SEQ ID NO: 17989 - DNA, 19 bp, Homo sapiens
cgcctggccgacttcggca

SEQ ID NO: 17990 - DNA, 19 bp, Homo sapiens
gcctggccgacttcggcta

SEQ ID NO: 17991 - DNA, 19 bp, Homo sapiens
cctggccgacttcggctca

SEQ ID NO: 17992 - DNA, 19 bp, Homo sapiens
ctggccgacttcggctcta

SEQ ID NO: 17993 - DNA, 19 bp, Homo sapiens
tggccgacttcggctctta

SEQ ID NO: 17994 - DNA, 19 bp, Homo sapiens
ggccgacttcggctcttga

SEQ ID NO: 17995 - DNA, 19 bp, Homo sapiens
gccgacttcggctcttgca

SEQ ID NO: 17996 - DNA, 19 bp, Homo sapiens
ccgacttcggctcttgcca

SEQ ID NO: 17997 - DNA, 19 bp, Homo sapiens
cgacttcggctcttgccta

SEQ ID NO: 17998 - DNA, 19 bp, Homo sapiens
cttcggctcttgcctcaaa

SEQ ID NO: 17999 - DNA, 19 bp, Homo sapiens
ttcggctcttgcctcaaga

SEQ ID NO: 18000 - DNA, 19 bp, Homo sapiens
tcggctcttgcctcaagca

SEQ ID NO: 18001 - DNA, 19 bp, Homo sapiens
cggctcttgcctcaagcta

SEQ ID NO: 18002 - DNA, 19 bp, Homo sapiens
ggctcttgcctcaagctga

SEQ ID NO: 18003 - DNA, 19 bp, Homo sapiens
gctcttgcctcaagctgca

SEQ ID NO: 18004 - DNA, 19 bp, Homo sapiens
ctcttgcctcaagctgcga

SEQ ID NO: 18005 - DNA, 19 bp, Homo sapiens
tcttgcctcaagctgcgga

SEQ ID NO: 18006 - DNA, 19 bp, Homo sapiens
cttgcctcaagctgcggga

SEQ ID NO: 18007 - DNA, 19 bp, Homo sapiens
tgcctcaagctgcgggcaa

SEQ ID NO: 18008 - DNA, 19 bp, Homo sapiens
cctcaagctgcgggcagaa

SEQ ID NO: 18009 - DNA, 19 bp, Homo sapiens
ctcaagctgcgggcagata

SEQ ID NO: 18010 - DNA, 19 bp, Homo sapiens
tcaagctgcgggcagatga

SEQ ID NO: 18011 - DNA, 19 bp, Homo sapiens
agctgcgggcagatggaaa

SEQ ID NO: 18012 - DNA, 19 bp, Homo sapiens
gctgcgggcagatggaaca

SEQ ID NO: 18013 - DNA, 19 bp, Homo sapiens
ctgcgggcagatggaacga

SEQ ID NO: 18014 - DNA, 19 bp, Homo sapiens
tgcgggcagatggaacgga

SEQ ID NO: 18015 - DNA, 19 bp, Homo sapiens
gcgggcagatggaacggta

SEQ ID NO: 18016 - DNA, 19 bp, Homo sapiens
cgggcagatggaacggtga

SEQ ID NO: 18017 - DNA, 19 bp, Homo sapiens
gggcagatggaacggtgca

SEQ ID NO: 18018 - DNA, 19 bp, Homo sapiens
ggcagatggaacggtgcga

SEQ ID NO: 18019 - DNA, 19 bp, Homo sapiens
gcagatggaacggtgcgga

SEQ ID NO: 18020 - DNA, 19 bp, Homo sapiens
cagatggaacggtgcggta

SEQ ID NO: 18021 - DNA, 19 bp, Homo sapiens
agatggaacggtgcggtca

SEQ ID NO: 18022 - DNA, 19 bp, Homo sapiens
gatggaacggtgcggtcga

SEQ ID NO: 18023 - DNA, 19 bp, Homo sapiens
atggaacggtgcggtcgca

SEQ ID NO: 18024 - DNA, 19 bp, Homo sapiens
tggaacggtgcggtcgcta

SEQ ID NO: 18025 - DNA, 19 bp, Homo sapiens
ggaacggtgcggtcgctga

SEQ ID NO: 18026 - DNA, 19 bp, Homo sapiens
gaacggtgcggtcgctgga

SEQ ID NO: 18027 - DNA, 19 bp, Homo sapiens
aacggtgcggtcgctggta

SEQ ID NO: 18028 - DNA, 19 bp, Homo sapiens
acggtgcggtcgctggtga

SEQ ID NO: 18029 - DNA, 19 bp, Homo sapiens
cggtgcggtcgctggtgga

SEQ ID NO: 18030 - DNA, 19 bp, Homo sapiens
ggtgcggtcgctggtggca

SEQ ID NO: 18031 - DNA, 19 bp, Homo sapiens
gtgcggtcgctggtggcta

SEQ ID NO: 18032 - DNA, 19 bp, Homo sapiens
tgcggtcgctggtggctga

SEQ ID NO: 18033 - DNA, 19 bp, Homo sapiens
gcggtcgctggtggctgta

SEQ ID NO: 18034 - DNA, 19 bp, Homo sapiens
cggtcgctggtggctgtga

SEQ ID NO: 18035 - DNA, 19 bp, Homo sapiens
ggtcgctggtggctgtgga

SEQ ID NO: 18036 - DNA, 19 bp, Homo sapiens
gtcgctggtggctgtggga

SEQ ID NO: 18037 - DNA, 19 bp, Homo sapiens
cgctggtggctgtgggcaa

SEQ ID NO: 18038 - DNA, 19 bp, Homo sapiens
gctggtggctgtgggcaca

SEQ ID NO: 18039 - DNA, 19 bp, Homo sapiens
ctggtggctgtgggcacca

SEQ ID NO: 18040 - DNA, 19 bp, Homo sapiens
tggtggctgtgggcaccca

SEQ ID NO: 18041 - DNA, 19 bp, Homo sapiens
gtggctgtgggcaccccaa

SEQ ID NO: 18042 - DNA, 19 bp, Homo sapiens
ggctgtgggcaccccagaa

SEQ ID NO: 18043 - DNA, 19 bp, Homo sapiens
gctgtgggcaccccagaca

SEQ ID NO: 18044 - DNA, 19 bp, Homo sapiens
tgtgggcaccccagactaa

SEQ ID NO: 18045 - DNA, 19 bp, Homo sapiens
gtgggcaccccagactaca

SEQ ID NO: 18046 - DNA, 19 bp, Homo sapiens
tgggcaccccagactacca

SEQ ID NO: 18047 - DNA, 19 bp, Homo sapiens
gggcaccccagactaccta

SEQ ID NO: 18048 - DNA, 19 bp, Homo sapiens
ggcaccccagactacctga

SEQ ID NO: 18049 - DNA, 19 bp, Homo sapiens
gcaccccagactacctgta

SEQ ID NO: 18050 - DNA, 19 bp, Homo sapiens
caccccagactacctgtca

SEQ ID NO: 18051 - DNA, 19 bp, Homo sapiens
accccagactacctgtcca

SEQ ID NO: 18052 - DNA, 19 bp, Homo sapiens
ccccagactacctgtccca

SEQ ID NO: 18053 - DNA, 19 bp, Homo sapiens
cccagactacctgtcccca

SEQ ID NO: 18054 - DNA, 19 bp, Homo sapiens
ccagactacctgtccccca

SEQ ID NO: 18055 - DNA, 19 bp, Homo sapiens
agactacctgtcccccgaa

SEQ ID NO: 18056 - DNA, 19 bp, Homo sapiens
actacctgtcccccgagaa

SEQ ID NO: 18057 - DNA, 19 bp, Homo sapiens
ctacctgtcccccgagata

SEQ ID NO: 18058 - DNA, 19 bp, Homo sapiens
tacctgtcccccgagatca

SEQ ID NO: 18059 - DNA, 19 bp, Homo sapiens
acctgtcccccgagatcca

SEQ ID NO: 18060 - DNA, 19 bp, Homo sapiens
cctgtcccccgagatccta

SEQ ID NO: 18061 - DNA, 19 bp, Homo sapiens
ctgtcccccgagatcctga

SEQ ID NO: 18062 - DNA, 19 bp, Homo sapiens
gtcccccgagatcctgcaa

SEQ ID NO: 18063 - DNA, 19 bp, Homo sapiens
tcccccgagatcctgcaga

SEQ ID NO: 18064 - DNA, 19 bp, Homo sapiens
cccccgagatcctgcagga

SEQ ID NO: 18065 - DNA, 19 bp, Homo sapiens
ccccgagatcctgcaggca

SEQ ID NO: 18066 - DNA, 19 bp, Homo sapiens
cccgagatcctgcaggcta

SEQ ID NO: 18067 - DNA, 19 bp, Homo sapiens
ccgagatcctgcaggctga

SEQ ID NO: 18068 - DNA, 19 bp, Homo sapiens
cgagatcctgcaggctgta

SEQ ID NO: 18069 - DNA, 19 bp, Homo sapiens
gagatcctgcaggctgtga

SEQ ID NO: 18070 - DNA, 19 bp, Homo sapiens
agatcctgcaggctgtgga

SEQ ID NO: 18071 - DNA, 19 bp, Homo sapiens
gatcctgcaggctgtggga

SEQ ID NO: 18072 - DNA, 19 bp, Homo sapiens
atcctgcaggctgtgggca

SEQ ID NO: 18073 - DNA, 19 bp, Homo sapiens
tcctgcaggctgtgggcga

SEQ ID NO: 18074 - DNA, 19 bp, Homo sapiens
cctgcaggctgtgggcgga

SEQ ID NO: 18075 - DNA, 19 bp, Homo sapiens
ctgcaggctgtgggcggta

SEQ ID NO: 18076 - DNA, 19 bp, Homo sapiens
tgcaggctgtgggcggtga

SEQ ID NO: 18077 - DNA, 19 bp, Homo sapiens
gcaggctgtgggcggtgga

SEQ ID NO: 18078 - DNA, 19 bp, Homo sapiens
caggctgtgggcggtggga

SEQ ID NO: 18079 - DNA, 19 bp, Homo sapiens
aggctgtgggcggtgggca

SEQ ID NO: 18080 - DNA, 19 bp, Homo sapiens
ggctgtgggcggtgggcca

SEQ ID NO: 18081 - DNA, 19 bp, Homo sapiens
gctgtgggcggtgggccta

SEQ ID NO: 18082 - DNA, 19 bp, Homo sapiens
ctgtgggcggtgggcctga

SEQ ID NO: 18083 - DNA, 19 bp, Homo sapiens
tgtgggcggtgggcctgga

SEQ ID NO: 18084 - DNA, 19 bp, Homo sapiens
tgggcggtgggcctgggaa

SEQ ID NO: 18085 - DNA, 19 bp, Homo sapiens
ggcggtgggcctgggacaa

SEQ ID NO: 18086 - DNA, 19 bp, Homo sapiens
gcggtgggcctgggacaga

SEQ ID NO: 18087 - DNA, 19 bp, Homo sapiens
cggtgggcctgggacagga

SEQ ID NO: 18088 - DNA, 19 bp, Homo sapiens
gtgggcctgggacaggcaa

SEQ ID NO: 18089 - DNA, 19 bp, Homo sapiens
tgggcctgggacaggcaga

SEQ ID NO: 18090 - DNA, 19 bp, Homo sapiens
gggcctgggacaggcagca

SEQ ID NO: 18091 - DNA, 19 bp, Homo sapiens
gcctgggacaggcagctaa

SEQ ID NO: 18092 - DNA, 19 bp, Homo sapiens
cctgggacaggcagctaca

SEQ ID NO: 18093 - DNA, 19 bp, Homo sapiens
ctgggacaggcagctacga

SEQ ID NO: 18094 - DNA, 19 bp, Homo sapiens
tgggacaggcagctacgga

SEQ ID NO: 18095 - DNA, 19 bp, Homo sapiens
gggacaggcagctacggga

SEQ ID NO: 18096 - DNA, 19 bp, Homo sapiens
ggacaggcagctacgggca

SEQ ID NO: 18097 - DNA, 19 bp, Homo sapiens
gacaggcagctacgggcca

SEQ ID NO: 18098 - DNA, 19 bp, Homo sapiens
acaggcagctacgggccca

SEQ ID NO: 18099 - DNA, 19 bp, Homo sapiens
aggcagctacgggcccgaa

SEQ ID NO: 18100 - DNA, 19 bp, Homo sapiens
ggcagctacgggcccgaga

SEQ ID NO: 18101 - DNA, 19 bp, Homo sapiens
gcagctacgggcccgagta

SEQ ID NO: 18102 - DNA, 19 bp, Homo sapiens
cagctacgggcccgagtga

SEQ ID NO: 18103 - DNA, 19 bp, Homo sapiens
agctacgggcccgagtgta

SEQ ID NO: 18104 - DNA, 19 bp, Homo sapiens
ctacgggcccgagtgtgaa

SEQ ID NO: 18105 - DNA, 19 bp, Homo sapiens
tacgggcccgagtgtgaca

SEQ ID NO: 18106 - DNA, 19 bp, Homo sapiens
acgggcccgagtgtgacta

SEQ ID NO: 18107 - DNA, 19 bp, Homo sapiens
cgggcccgagtgtgactga

SEQ ID NO: 18108 - DNA, 19 bp, Homo sapiens
gggcccgagtgtgactgga

SEQ ID NO: 18109 - DNA, 19 bp, Homo sapiens
ggcccgagtgtgactggta

SEQ ID NO: 18110 - DNA, 19 bp, Homo sapiens
gcccgagtgtgactggtga

SEQ ID NO: 18111 - DNA, 19 bp, Homo sapiens
cccgagtgtgactggtgga

SEQ ID NO: 18112 - DNA, 19 bp, Homo sapiens
ccgagtgtgactggtggga

SEQ ID NO: 18113 - DNA, 19 bp, Homo sapiens
cgagtgtgactggtgggca

SEQ ID NO: 18114 - DNA, 19 bp, Homo sapiens
gagtgtgactggtgggcga

SEQ ID NO: 18115 - DNA, 19 bp, Homo sapiens
agtgtgactggtgggcgca

SEQ ID NO: 18116 - DNA, 19 bp, Homo sapiens
gtgtgactggtgggcgcta

SEQ ID NO: 18117 - DNA, 19 bp, Homo sapiens
tgtgactggtgggcgctga

SEQ ID NO: 18118 - DNA, 19 bp, Homo sapiens
gtgactggtgggcgctgga

SEQ ID NO: 18119 - DNA, 19 bp, Homo sapiens
tgactggtgggcgctggga

SEQ ID NO: 18120 - DNA, 19 bp, Homo sapiens
gactggtgggcgctgggta

SEQ ID NO: 18121 - DNA, 19 bp, Homo sapiens
actggtgggcgctgggtga

SEQ ID NO: 18122 - DNA, 19 bp, Homo sapiens
tggtgggcgctgggtgtaa

SEQ ID NO: 18123 - DNA, 19 bp, Homo sapiens
ggtgggcgctgggtgtata

SEQ ID NO: 18124 - DNA, 19 bp, Homo sapiens
gtgggcgctgggtgtatta

SEQ ID NO: 18125 - DNA, 19 bp, Homo sapiens
tgggcgctgggtgtattca

SEQ ID NO: 18126 - DNA, 19 bp, Homo sapiens
gggcgctgggtgtattcga

SEQ ID NO: 18127 - DNA, 19 bp, Homo sapiens
ggcgctgggtgtattcgca

SEQ ID NO: 18128 - DNA, 19 bp, Homo sapiens
gcgctgggtgtattcgcca

SEQ ID NO: 18129 - DNA, 19 bp, Homo sapiens
gctgggtgtattcgcctaa

SEQ ID NO: 18130 - DNA, 19 bp, Homo sapiens
ctgggtgtattcgcctata

SEQ ID NO: 18131 - DNA, 19 bp, Homo sapiens
gtgtattcgcctatgaaaa

SEQ ID NO: 18132 - DNA, 19 bp, Homo sapiens
tgtattcgcctatgaaata

SEQ ID NO: 18133 - DNA, 19 bp, Homo sapiens
gtattcgcctatgaaatga

SEQ ID NO: 18134 - DNA, 19 bp, Homo sapiens
tattcgcctatgaaatgta

SEQ ID NO: 18135 - DNA, 19 bp, Homo sapiens
attcgcctatgaaatgtta

SEQ ID NO: 18136 - DNA, 19 bp, Homo sapiens
ttcgcctatgaaatgttca

SEQ ID NO: 18137 - DNA, 19 bp, Homo sapiens
cgcctatgaaatgttctaa

SEQ ID NO: 18138 - DNA, 19 bp, Homo sapiens
gcctatgaaatgttctata

SEQ ID NO: 18139 - DNA, 19 bp, Homo sapiens
cctatgaaatgttctatga

SEQ ID NO: 18140 - DNA, 19 bp, Homo sapiens
ctatgaaatgttctatgga

SEQ ID NO: 18141 - DNA, 19 bp, Homo sapiens
tatgaaatgttctatggga

SEQ ID NO: 18142 - DNA, 19 bp, Homo sapiens
tgaaatgttctatgggcaa

SEQ ID NO: 18143 - DNA, 19 bp, Homo sapiens
aaatgttctatgggcagaa

SEQ ID NO: 18144 - DNA, 19 bp, Homo sapiens
aatgttctatgggcagaca

SEQ ID NO: 18145 - DNA, 19 bp, Homo sapiens
atgttctatgggcagacga

SEQ ID NO: 18146 - DNA, 19 bp, Homo sapiens
tgttctatgggcagacgca

SEQ ID NO: 18147 - DNA, 19 bp, Homo sapiens
gttctatgggcagacgcca

SEQ ID NO: 18148 - DNA, 19 bp, Homo sapiens
ttctatgggcagacgccca

SEQ ID NO: 18149 - DNA, 19 bp, Homo sapiens
tctatgggcagacgcccta

SEQ ID NO: 18150 - DNA, 19 bp, Homo sapiens
ctatgggcagacgccctta

SEQ ID NO: 18151 - DNA, 19 bp, Homo sapiens
tatgggcagacgcccttca

SEQ ID NO: 18152 - DNA, 19 bp, Homo sapiens
tgggcagacgcccttctaa

SEQ ID NO: 18153 - DNA, 19 bp, Homo sapiens
gggcagacgcccttctaca

SEQ ID NO: 18154 - DNA, 19 bp, Homo sapiens
ggcagacgcccttctacga

SEQ ID NO: 18155 - DNA, 19 bp, Homo sapiens
gcagacgcccttctacgca

SEQ ID NO: 18156 - DNA, 19 bp, Homo sapiens
cagacgcccttctacgcga

SEQ ID NO: 18157 - DNA, 19 bp, Homo sapiens
gacgcccttctacgcggaa

SEQ ID NO: 18158 - DNA, 19 bp, Homo sapiens
acgcccttctacgcggata

SEQ ID NO: 18159 - DNA, 19 bp, Homo sapiens
cgcccttctacgcggatta

SEQ ID NO: 18160 - DNA, 19 bp, Homo sapiens
gcccttctacgcggattca

SEQ ID NO: 18161 - DNA, 19 bp, Homo sapiens
ccttctacgcggattccaa

SEQ ID NO: 18162 - DNA, 19 bp, Homo sapiens
cttctacgcggattccaca

SEQ ID NO: 18163 - DNA, 19 bp, Homo sapiens
ttctacgcggattccacga

SEQ ID NO: 18164 - DNA, 19 bp, Homo sapiens
tctacgcggattccacgga

SEQ ID NO: 18165 - DNA, 19 bp, Homo sapiens
ctacgcggattccacggca

SEQ ID NO: 18166 - DNA, 19 bp, Homo sapiens
tacgcggattccacggcga

SEQ ID NO: 18167 - DNA, 19 bp, Homo sapiens
cgcggattccacggcggaa

SEQ ID NO: 18168 - DNA, 19 bp, Homo sapiens
cggattccacggcggagaa

SEQ ID NO: 18169 - DNA, 19 bp, Homo sapiens
ggattccacggcggagaca

SEQ ID NO: 18170 - DNA, 19 bp, Homo sapiens
gattccacggcggagacca

SEQ ID NO: 18171 - DNA, 19 bp, Homo sapiens
ttccacggcggagacctaa

SEQ ID NO: 18172 - DNA, 19 bp, Homo sapiens
tccacggcggagacctata

SEQ ID NO: 18173 - DNA, 19 bp, Homo sapiens
ccacggcggagacctatga

SEQ ID NO: 18174 - DNA, 19 bp, Homo sapiens
cacggcggagacctatgga

SEQ ID NO: 18175 - DNA, 19 bp, Homo sapiens
ggcggagacctatggcaaa

SEQ ID NO: 18176 - DNA, 19 bp, Homo sapiens
cggagacctatggcaagaa

SEQ ID NO: 18177 - DNA, 19 bp, Homo sapiens
ggagacctatggcaagata

SEQ ID NO: 18178 - DNA, 19 bp, Homo sapiens
gagacctatggcaagatca

SEQ ID NO: 18179 - DNA, 19 bp, Homo sapiens
agacctatggcaagatcga

SEQ ID NO: 18180 - DNA, 19 bp, Homo sapiens
gacctatggcaagatcgta

SEQ ID NO: 18181 - DNA, 19 bp, Homo sapiens
acctatggcaagatcgtca

SEQ ID NO: 18182 - DNA, 19 bp, Homo sapiens
ctatggcaagatcgtccaa

SEQ ID NO: 18183 - DNA, 19 bp, Homo sapiens
tatggcaagatcgtccaca

SEQ ID NO: 18184 - DNA, 19 bp, Homo sapiens
tggcaagatcgtccactaa

SEQ ID NO: 18185 - DNA, 19 bp, Homo sapiens
caagatcgtccactacaaa

SEQ ID NO: 18186 - DNA, 19 bp, Homo sapiens
aagatcgtccactacaaga

SEQ ID NO: 18187 - DNA, 19 bp, Homo sapiens
gatcgtccactacaaggaa

SEQ ID NO: 18188 - DNA, 19 bp, Homo sapiens
atcgtccactacaaggaga

SEQ ID NO: 18189 - DNA, 19 bp, Homo sapiens
cgtccactacaaggagcaa

SEQ ID NO: 18190 - DNA, 19 bp, Homo sapiens
gtccactacaaggagcaca

SEQ ID NO: 18191 - DNA, 19 bp, Homo sapiens
tccactacaaggagcacca

SEQ ID NO: 18192 - DNA, 19 bp, Homo sapiens
ccactacaaggagcaccta

SEQ ID NO: 18193 - DNA, 19 bp, Homo sapiens
cactacaaggagcacctca

SEQ ID NO: 18194 - DNA, 19 bp, Homo sapiens
actacaaggagcacctcta

SEQ ID NO: 18195 - DNA, 19 bp, Homo sapiens
ctacaaggagcacctctca

SEQ ID NO: 18196 - DNA, 19 bp, Homo sapiens
tacaaggagcacctctcta

SEQ ID NO: 18197 - DNA, 19 bp, Homo sapiens
acaaggagcacctctctca

SEQ ID NO: 18198 - DNA, 19 bp, Homo sapiens
caaggagcacctctctcta

SEQ ID NO: 18199 - DNA, 19 bp, Homo sapiens
aaggagcacctctctctga

SEQ ID NO: 18200 - DNA, 19 bp, Homo sapiens
aggagcacctctctctgca

SEQ ID NO: 18201 - DNA, 19 bp, Homo sapiens
ggagcacctctctctgcca

SEQ ID NO: 18202 - DNA, 19 bp, Homo sapiens
gagcacctctctctgccga

SEQ ID NO: 18203 - DNA, 19 bp, Homo sapiens
agcacctctctctgccgca

SEQ ID NO: 18204 - DNA, 19 bp, Homo sapiens
gcacctctctctgccgcta

SEQ ID NO: 18205 - DNA, 19 bp, Homo sapiens
cacctctctctgccgctga

SEQ ID NO: 18206 - DNA, 19 bp, Homo sapiens
acctctctctgccgctgga

SEQ ID NO: 18207 - DNA, 19 bp, Homo sapiens
cctctctctgccgctggta

SEQ ID NO: 18208 - DNA, 19 bp, Homo sapiens
ctctctctgccgctggtga

SEQ ID NO: 18209 - DNA, 19 bp, Homo sapiens
ctctctgccgctggtggaa

SEQ ID NO: 18210 - DNA, 19 bp, Homo sapiens
tctctgccgctggtggaca

SEQ ID NO: 18211 - DNA, 19 bp, Homo sapiens
ctgccgctggtggacgaaa

SEQ ID NO: 18212 - DNA, 19 bp, Homo sapiens
tgccgctggtggacgaaga

SEQ ID NO: 18213 - DNA, 19 bp, Homo sapiens
gccgctggtggacgaagga

SEQ ID NO: 18214 - DNA, 19 bp, Homo sapiens
ccgctggtggacgaaggga

SEQ ID NO: 18215 - DNA, 19 bp, Homo sapiens
cgctggtggacgaagggga

SEQ ID NO: 18216 - DNA, 19 bp, Homo sapiens
gctggtggacgaaggggta

SEQ ID NO: 18217 - DNA, 19 bp, Homo sapiens
ctggtggacgaaggggtca

SEQ ID NO: 18218 - DNA, 19 bp, Homo sapiens
tggtggacgaaggggtcca

SEQ ID NO: 18219 - DNA, 19 bp, Homo sapiens
ggtggacgaaggggtccca

SEQ ID NO: 18220 - DNA, 19 bp, Homo sapiens
gtggacgaaggggtcccta

SEQ ID NO: 18221 - DNA, 19 bp, Homo sapiens
ggacgaaggggtccctgaa

SEQ ID NO: 18222 - DNA, 19 bp, Homo sapiens
gacgaaggggtccctgaga

SEQ ID NO: 18223 - DNA, 19 bp, Homo sapiens
cgaaggggtccctgaggaa

SEQ ID NO: 18224 - DNA, 19 bp, Homo sapiens
gaaggggtccctgaggaga

SEQ ID NO: 18225 - DNA, 19 bp, Homo sapiens
aaggggtccctgaggagga

SEQ ID NO: 18226 - DNA, 19 bp, Homo sapiens
aggggtccctgaggaggca

SEQ ID NO: 18227 - DNA, 19 bp, Homo sapiens
ggggtccctgaggaggcta

SEQ ID NO: 18228 - DNA, 19 bp, Homo sapiens
gggtccctgaggaggctca

SEQ ID NO: 18229 - DNA, 19 bp, Homo sapiens
gtccctgaggaggctcgaa

SEQ ID NO: 18230 - DNA, 19 bp, Homo sapiens
ccctgaggaggctcgagaa

SEQ ID NO: 18231 - DNA, 19 bp, Homo sapiens
cctgaggaggctcgagaca

SEQ ID NO: 18232 - DNA, 19 bp, Homo sapiens
ctgaggaggctcgagacta

SEQ ID NO: 18233 - DNA, 19 bp, Homo sapiens
tgaggaggctcgagactta

SEQ ID NO: 18234 - DNA, 19 bp, Homo sapiens
aggaggctcgagacttcaa

SEQ ID NO: 18235 - DNA, 19 bp, Homo sapiens
ggaggctcgagacttcata

SEQ ID NO: 18236 - DNA, 19 bp, Homo sapiens
gaggctcgagacttcatta

SEQ ID NO: 18237 - DNA, 19 bp, Homo sapiens
ggctcgagacttcattcaa

SEQ ID NO: 18238 - DNA, 19 bp, Homo sapiens
gctcgagacttcattcaga

SEQ ID NO: 18239 - DNA, 19 bp, Homo sapiens
ctcgagacttcattcagca

SEQ ID NO: 18240 - DNA, 19 bp, Homo sapiens
tcgagacttcattcagcga

SEQ ID NO: 18241 - DNA, 19 bp, Homo sapiens
cgagacttcattcagcgga

SEQ ID NO: 18242 - DNA, 19 bp, Homo sapiens
gagacttcattcagcggta

SEQ ID NO: 18243 - DNA, 19 bp, Homo sapiens
agacttcattcagcggtta

SEQ ID NO: 18244 - DNA, 19 bp, Homo sapiens
gacttcattcagcggttga

SEQ ID NO: 18245 - DNA, 19 bp, Homo sapiens
acttcattcagcggttgca

SEQ ID NO: 18246 - DNA, 19 bp, Homo sapiens
cttcattcagcggttgcta

SEQ ID NO: 18247 - DNA, 19 bp, Homo sapiens
ttcattcagcggttgctga

SEQ ID NO: 18248 - DNA, 19 bp, Homo sapiens
tcattcagcggttgctgta

SEQ ID NO: 18249 - DNA, 19 bp, Homo sapiens
cattcagcggttgctgtga

SEQ ID NO: 18250 - DNA, 19 bp, Homo sapiens
attcagcggttgctgtgta

SEQ ID NO: 18251 - DNA, 19 bp, Homo sapiens
ttcagcggttgctgtgtca

SEQ ID NO: 18252 - DNA, 19 bp, Homo sapiens
tcagcggttgctgtgtcca

SEQ ID NO: 18253 - DNA, 19 bp, Homo sapiens
cagcggttgctgtgtccca

SEQ ID NO: 18254 - DNA, 19 bp, Homo sapiens
agcggttgctgtgtcccca

SEQ ID NO: 18255 - DNA, 19 bp, Homo sapiens
gcggttgctgtgtccccca

SEQ ID NO: 18256 - DNA, 19 bp, Homo sapiens
cggttgctgtgtcccccga

SEQ ID NO: 18257 - DNA, 19 bp, Homo sapiens
gttgctgtgtcccccggaa

SEQ ID NO: 18258 - DNA, 19 bp, Homo sapiens
tgctgtgtcccccggagaa

SEQ ID NO: 18259 - DNA, 19 bp, Homo sapiens
ctgtgtcccccggagacaa

SEQ ID NO: 18260 - DNA, 19 bp, Homo sapiens
tgtgtcccccggagacaca

SEQ ID NO: 18261 - DNA, 19 bp, Homo sapiens
gtgtcccccggagacacga

SEQ ID NO: 18262 - DNA, 19 bp, Homo sapiens
tgtcccccggagacacgga

SEQ ID NO: 18263 - DNA, 19 bp, Homo sapiens
gtcccccggagacacggca

SEQ ID NO: 18264 - DNA, 19 bp, Homo sapiens
tcccccggagacacggcta

SEQ ID NO: 18265 - DNA, 19 bp, Homo sapiens
cccccggagacacggctga

SEQ ID NO: 18266 - DNA, 19 bp, Homo sapiens
ccccggagacacggctgga

SEQ ID NO: 18267 - DNA, 19 bp, Homo sapiens
cccggagacacggctggga

SEQ ID NO: 18268 - DNA, 19 bp, Homo sapiens
ccggagacacggctgggca

SEQ ID NO: 18269 - DNA, 19 bp, Homo sapiens
cggagacacggctgggcca

SEQ ID NO: 18270 - DNA, 19 bp, Homo sapiens
ggagacacggctgggccga

SEQ ID NO: 18271 - DNA, 19 bp, Homo sapiens
gagacacggctgggccgga

SEQ ID NO: 18272 - DNA, 19 bp, Homo sapiens
agacacggctgggccggga

SEQ ID NO: 18273 - DNA, 19 bp, Homo sapiens
gacacggctgggccgggga

SEQ ID NO: 18274 - DNA, 19 bp, Homo sapiens
acacggctgggccggggta

SEQ ID NO: 18275 - DNA, 19 bp, Homo sapiens
cacggctgggccggggtga

SEQ ID NO: 18276 - DNA, 19 bp, Homo sapiens
cggctgggccggggtggaa

SEQ ID NO: 18277 - DNA, 19 bp, Homo sapiens
ggctgggccggggtggaga

SEQ ID NO: 18278 - DNA, 19 bp, Homo sapiens
ctgggccggggtggagcaa

SEQ ID NO: 18279 - DNA, 19 bp, Homo sapiens
tgggccggggtggagcaga

SEQ ID NO: 18280 - DNA, 19 bp, Homo sapiens
gggccggggtggagcagga

SEQ ID NO: 18281 - DNA, 19 bp, Homo sapiens
ggccggggtggagcaggca

SEQ ID NO: 18282 - DNA, 19 bp, Homo sapiens
ccggggtggagcaggcgaa

SEQ ID NO: 18283 - DNA, 19 bp, Homo sapiens
cggggtggagcaggcgaca

SEQ ID NO: 18284 - DNA, 19 bp, Homo sapiens
ggggtggagcaggcgacta

SEQ ID NO: 18285 - DNA, 19 bp, Homo sapiens
gggtggagcaggcgactta

SEQ ID NO: 18286 - DNA, 19 bp, Homo sapiens
ggtggagcaggcgacttca

SEQ ID NO: 18287 - DNA, 19 bp, Homo sapiens
gtggagcaggcgacttcca

SEQ ID NO: 18288 - DNA, 19 bp, Homo sapiens
tggagcaggcgacttccga

SEQ ID NO: 18289 - DNA, 19 bp, Homo sapiens
gagcaggcgacttccggaa

SEQ ID NO: 18290 - DNA, 19 bp, Homo sapiens
gcaggcgacttccggacaa

SEQ ID NO: 18291 - DNA, 19 bp, Homo sapiens
aggcgacttccggacacaa

SEQ ID NO: 18292 - DNA, 19 bp, Homo sapiens
ggcgacttccggacacata

SEQ ID NO: 18293 - DNA, 19 bp, Homo sapiens
gcgacttccggacacatca

SEQ ID NO: 18294 - DNA, 19 bp, Homo sapiens
cgacttccggacacatcca

SEQ ID NO: 18295 - DNA, 19 bp, Homo sapiens
gacttccggacacatccca

SEQ ID NO: 18296 - DNA, 19 bp, Homo sapiens
acttccggacacatcccta

SEQ ID NO: 18297 - DNA, 19 bp, Homo sapiens
cttccggacacatccctta

SEQ ID NO: 18298 - DNA, 19 bp, Homo sapiens
ttccggacacatcccttca

SEQ ID NO: 18299 - DNA, 19 bp, Homo sapiens
tccggacacatcccttcta

SEQ ID NO: 18300 - DNA, 19 bp, Homo sapiens
ccggacacatcccttctta

SEQ ID NO: 18301 - DNA, 19 bp, Homo sapiens
cggacacatcccttcttca

SEQ ID NO: 18302 - DNA, 19 bp, Homo sapiens
ggacacatcccttcttcta

SEQ ID NO: 18303 - DNA, 19 bp, Homo sapiens
gacacatcccttcttctta

SEQ ID NO: 18304 - DNA, 19 bp, Homo sapiens
acacatcccttcttcttta

SEQ ID NO: 18305 - DNA, 19 bp, Homo sapiens
cacatcccttcttctttga

SEQ ID NO: 18306 - DNA, 19 bp, Homo sapiens
acatcccttcttctttgga

SEQ ID NO: 18307 - DNA, 19 bp, Homo sapiens
catcccttcttctttggca

SEQ ID NO: 18308 - DNA, 19 bp, Homo sapiens
atcccttcttctttggcca

SEQ ID NO: 18309 - DNA, 19 bp, Homo sapiens
tcccttcttctttggccta

SEQ ID NO: 18310 - DNA, 19 bp, Homo sapiens
cccttcttctttggcctca

SEQ ID NO: 18311 - DNA, 19 bp, Homo sapiens
cttcttctttggcctcgaa

SEQ ID NO: 18312 - DNA, 19 bp, Homo sapiens
ttcttctttggcctcgaca

SEQ ID NO: 18313 - DNA, 19 bp, Homo sapiens
tcttctttggcctcgacta

SEQ ID NO: 18314 - DNA, 19 bp, Homo sapiens
cttctttggcctcgactga

SEQ ID NO: 18315 - DNA, 19 bp, Homo sapiens
ttctttggcctcgactgga

SEQ ID NO: 18316 - DNA, 19 bp, Homo sapiens
ctttggcctcgactgggaa

SEQ ID NO: 18317 - DNA, 19 bp, Homo sapiens
tttggcctcgactgggata

SEQ ID NO: 18318 - DNA, 19 bp, Homo sapiens
ttggcctcgactgggatga

SEQ ID NO: 18319 - DNA, 19 bp, Homo sapiens
tggcctcgactgggatgga

SEQ ID NO: 18320 - DNA, 19 bp, Homo sapiens
ggcctcgactgggatggta

SEQ ID NO: 18321 - DNA, 19 bp, Homo sapiens
gcctcgactgggatggtca

SEQ ID NO: 18322 - DNA, 19 bp, Homo sapiens
cctcgactgggatggtcta

SEQ ID NO: 18323 - DNA, 19 bp, Homo sapiens
ctcgactgggatggtctca

SEQ ID NO: 18324 - DNA, 19 bp, Homo sapiens
tcgactgggatggtctcca

SEQ ID NO: 18325 - DNA, 19 bp, Homo sapiens
cgactgggatggtctccga

SEQ ID NO: 18326 - DNA, 19 bp, Homo sapiens
gactgggatggtctccgga

SEQ ID NO: 18327 - DNA, 19 bp, Homo sapiens
ctgggatggtctccgggaa

SEQ ID NO: 18328 - DNA, 19 bp, Homo sapiens
gggatggtctccgggacaa

SEQ ID NO: 18329 - DNA, 19 bp, Homo sapiens
ggatggtctccgggacaga

SEQ ID NO: 18330 - DNA, 19 bp, Homo sapiens
gatggtctccgggacagca

SEQ ID NO: 18331 - DNA, 19 bp, Homo sapiens
atggtctccgggacagcga

SEQ ID NO: 18332 - DNA, 19 bp, Homo sapiens
tggtctccgggacagcgta

SEQ ID NO: 18333 - DNA, 19 bp, Homo sapiens
ggtctccgggacagcgtga

SEQ ID NO: 18334 - DNA, 19 bp, Homo sapiens
gtctccgggacagcgtgca

SEQ ID NO: 18335 - DNA, 19 bp, Homo sapiens
tctccgggacagcgtgcca

SEQ ID NO: 18336 - DNA, 19 bp, Homo sapiens
ctccgggacagcgtgccca

SEQ ID NO: 18337 - DNA, 19 bp, Homo sapiens
tccgggacagcgtgcccca

SEQ ID NO: 18338 - DNA, 19 bp, Homo sapiens
ccgggacagcgtgccccca

SEQ ID NO: 18339 - DNA, 19 bp, Homo sapiens
cgggacagcgtgcccccca

SEQ ID NO: 18340 - DNA, 19 bp, Homo sapiens
gggacagcgtgccccccta

SEQ ID NO: 18341 - DNA, 19 bp, Homo sapiens
ggacagcgtgcccccctta

SEQ ID NO: 18342 - DNA, 19 bp, Homo sapiens
acagcgtgcccccctttaa

SEQ ID NO: 18343 - DNA, 19 bp, Homo sapiens
agcgtgcccccctttacaa

SEQ ID NO: 18344 - DNA, 19 bp, Homo sapiens
gcgtgcccccctttacaca

SEQ ID NO: 18345 - DNA, 19 bp, Homo sapiens
cgtgcccccctttacacca

SEQ ID NO: 18346 - DNA, 19 bp, Homo sapiens
gtgcccccctttacaccga

SEQ ID NO: 18347 - DNA, 19 bp, Homo sapiens
gcccccctttacaccggaa

SEQ ID NO: 18348 - DNA, 19 bp, Homo sapiens
cccccctttacaccggata

SEQ ID NO: 18349 - DNA, 19 bp, Homo sapiens
ccccctttacaccggatta

SEQ ID NO: 18350 - DNA, 19 bp, Homo sapiens
cccctttacaccggattta

SEQ ID NO: 18351 - DNA, 19 bp, Homo sapiens
ccctttacaccggatttca

SEQ ID NO: 18352 - DNA, 19 bp, Homo sapiens
tttacaccggatttcgaaa

SEQ ID NO: 18353 - DNA, 19 bp, Homo sapiens
ttacaccggatttcgaaga

SEQ ID NO: 18354 - DNA, 19 bp, Homo sapiens
tacaccggatttcgaagga

SEQ ID NO: 18355 - DNA, 19 bp, Homo sapiens
acaccggatttcgaaggta

SEQ ID NO: 18356 - DNA, 19 bp, Homo sapiens
caccggatttcgaaggtga

SEQ ID NO: 18357 - DNA, 19 bp, Homo sapiens
accggatttcgaaggtgca

SEQ ID NO: 18358 - DNA, 19 bp, Homo sapiens
cggatttcgaaggtgccaa

SEQ ID NO: 18359 - DNA, 19 bp, Homo sapiens
ggatttcgaaggtgccaca

SEQ ID NO: 18360 - DNA, 19 bp, Homo sapiens
gatttcgaaggtgccacca

SEQ ID NO: 18361 - DNA, 19 bp, Homo sapiens
tttcgaaggtgccaccgaa

SEQ ID NO: 18362 - DNA, 19 bp, Homo sapiens
tcgaaggtgccaccgacaa

SEQ ID NO: 18363 - DNA, 19 bp, Homo sapiens
gaaggtgccaccgacacaa

SEQ ID NO: 18364 - DNA, 19 bp, Homo sapiens
aaggtgccaccgacacata

SEQ ID NO: 18365 - DNA, 19 bp, Homo sapiens
aggtgccaccgacacatga

SEQ ID NO: 18366 - DNA, 19 bp, Homo sapiens
tgccaccgacacatgcaaa

SEQ ID NO: 18367 - DNA, 19 bp, Homo sapiens
gccaccgacacatgcaaca

SEQ ID NO: 18368 - DNA, 19 bp, Homo sapiens
ccaccgacacatgcaacta

SEQ ID NO: 18369 - DNA, 19 bp, Homo sapiens
caccgacacatgcaactta

SEQ ID NO: 18370 - DNA, 19 bp, Homo sapiens
accgacacatgcaacttca

SEQ ID NO: 18371 - DNA, 19 bp, Homo sapiens
cgacacatgcaacttcgaa

SEQ ID NO: 18372 - DNA, 19 bp, Homo sapiens
gacacatgcaacttcgaca

SEQ ID NO: 18373 - DNA, 19 bp, Homo sapiens
acacatgcaacttcgacta

SEQ ID NO: 18374 - DNA, 19 bp, Homo sapiens
cacatgcaacttcgactta

SEQ ID NO: 18375 - DNA, 19 bp, Homo sapiens
acatgcaacttcgacttga

SEQ ID NO: 18376 - DNA, 19 bp, Homo sapiens
catgcaacttcgacttgga

SEQ ID NO: 18377 - DNA, 19 bp, Homo sapiens
atgcaacttcgacttggta

SEQ ID NO: 18378 - DNA, 19 bp, Homo sapiens
tgcaacttcgacttggtga

SEQ ID NO: 18379 - DNA, 19 bp, Homo sapiens
caacttcgacttggtggaa

SEQ ID NO: 18380 - DNA, 19 bp, Homo sapiens
aacttcgacttggtggaga

SEQ ID NO: 18381 - DNA, 19 bp, Homo sapiens
cttcgacttggtggaggaa

SEQ ID NO: 18382 - DNA, 19 bp, Homo sapiens
ttcgacttggtggaggaca

SEQ ID NO: 18383 - DNA, 19 bp, Homo sapiens
tcgacttggtggaggacga

SEQ ID NO: 18384 - DNA, 19 bp, Homo sapiens
cgacttggtggaggacgga

SEQ ID NO: 18385 - DNA, 19 bp, Homo sapiens
gacttggtggaggacggga

SEQ ID NO: 18386 - DNA, 19 bp, Homo sapiens
acttggtggaggacgggca

SEQ ID NO: 18387 - DNA, 19 bp, Homo sapiens
cttggtggaggacgggcta

SEQ ID NO: 18388 - DNA, 19 bp, Homo sapiens
tggtggaggacgggctcaa

SEQ ID NO: 18389 - DNA, 19 bp, Homo sapiens
ggtggaggacgggctcaca

SEQ ID NO: 18390 - DNA, 19 bp, Homo sapiens
gtggaggacgggctcacta

SEQ ID NO: 18391 - DNA, 19 bp, Homo sapiens
tggaggacgggctcactga

SEQ ID NO: 18392 - DNA, 19 bp, Homo sapiens
ggaggacgggctcactgca

SEQ ID NO: 18393 - DNA, 19 bp, Homo sapiens
aggacgggctcactgccaa

SEQ ID NO: 18394 - DNA, 19 bp, Homo sapiens
ggacgggctcactgccata

SEQ ID NO: 18395 - DNA, 19 bp, Homo sapiens
gacgggctcactgccatga

SEQ ID NO: 18396 - DNA, 19 bp, Homo sapiens
cgggctcactgccatggaa

SEQ ID NO: 18397 - DNA, 19 bp, Homo sapiens
ggctcactgccatggagaa

SEQ ID NO: 18398 - DNA, 19 bp, Homo sapiens
ctcactgccatggagacaa

SEQ ID NO: 18399 - DNA, 19 bp, Homo sapiens
tcactgccatggagacaca

SEQ ID NO: 18400 - DNA, 19 bp, Homo sapiens
cactgccatggagacacta

SEQ ID NO: 18401 - DNA, 19 bp, Homo sapiens
actgccatggagacactga

SEQ ID NO: 18402 - DNA, 19 bp, Homo sapiens
ctgccatggagacactgta

SEQ ID NO: 18403 - DNA, 19 bp, Homo sapiens
tgccatggagacactgtca

SEQ ID NO: 18404 - DNA, 19 bp, Homo sapiens
gccatggagacactgtcga

SEQ ID NO: 18405 - DNA, 19 bp, Homo sapiens
catggagacactgtcggaa

SEQ ID NO: 18406 - DNA, 19 bp, Homo sapiens
tggagacactgtcggacaa

SEQ ID NO: 18407 - DNA, 19 bp, Homo sapiens
ggagacactgtcggacata

SEQ ID NO: 18408 - DNA, 19 bp, Homo sapiens
gagacactgtcggacatta

SEQ ID NO: 18409 - DNA, 19 bp, Homo sapiens
agacactgtcggacattca

SEQ ID NO: 18410 - DNA, 19 bp, Homo sapiens
gacactgtcggacattcga

SEQ ID NO: 18411 - DNA, 19 bp, Homo sapiens
acactgtcggacattcgga

SEQ ID NO: 18412 - DNA, 19 bp, Homo sapiens
ctgtcggacattcgggaaa

SEQ ID NO: 18413 - DNA, 19 bp, Homo sapiens
tgtcggacattcgggaaga

SEQ ID NO: 18414 - DNA, 19 bp, Homo sapiens
gtcggacattcgggaagga

SEQ ID NO: 18415 - DNA, 19 bp, Homo sapiens
tcggacattcgggaaggta

SEQ ID NO: 18416 - DNA, 19 bp, Homo sapiens
cggacattcgggaaggtga

SEQ ID NO: 18417 - DNA, 19 bp, Homo sapiens
ggacattcgggaaggtgca

SEQ ID NO: 18418 - DNA, 19 bp, Homo sapiens
gacattcgggaaggtgcga

SEQ ID NO: 18419 - DNA, 19 bp, Homo sapiens
acattcgggaaggtgcgca

SEQ ID NO: 18420 - DNA, 19 bp, Homo sapiens
cattcgggaaggtgcgcca

SEQ ID NO: 18421 - DNA, 19 bp, Homo sapiens
attcgggaaggtgcgccga

SEQ ID NO: 18422 - DNA, 19 bp, Homo sapiens
ttcgggaaggtgcgccgca

SEQ ID NO: 18423 - DNA, 19 bp, Homo sapiens
cgggaaggtgcgccgctaa

SEQ ID NO: 18424 - DNA, 19 bp, Homo sapiens
gggaaggtgcgccgctaga

SEQ ID NO: 18425 - DNA, 19 bp, Homo sapiens
ggaaggtgcgccgctagga

SEQ ID NO: 18426 - DNA, 19 bp, Homo sapiens
gaaggtgcgccgctaggga

SEQ ID NO: 18427 - DNA, 19 bp, Homo sapiens
aaggtgcgccgctagggga

SEQ ID NO: 18428 - DNA, 19 bp, Homo sapiens
aggtgcgccgctaggggta

SEQ ID NO: 18429 - DNA, 19 bp, Homo sapiens
ggtgcgccgctaggggtca

SEQ ID NO: 18430 - DNA, 19 bp, Homo sapiens
tgcgccgctaggggtccaa

SEQ ID NO: 18431 - DNA, 19 bp, Homo sapiens
gcgccgctaggggtccaca

SEQ ID NO: 18432 - DNA, 19 bp, Homo sapiens
cgccgctaggggtccacca

SEQ ID NO: 18433 - DNA, 19 bp, Homo sapiens
gccgctaggggtccaccta

SEQ ID NO: 18434 - DNA, 19 bp, Homo sapiens
ccgctaggggtccacctga

SEQ ID NO: 18435 - DNA, 19 bp, Homo sapiens
cgctaggggtccacctgca

SEQ ID NO: 18436 - DNA, 19 bp, Homo sapiens
gctaggggtccacctgcca

SEQ ID NO: 18437 - DNA, 19 bp, Homo sapiens
ctaggggtccacctgccta

SEQ ID NO: 18438 - DNA, 19 bp, Homo sapiens
taggggtccacctgcctta

SEQ ID NO: 18439 - DNA, 19 bp, Homo sapiens
aggggtccacctgccttta

SEQ ID NO: 18440 - DNA, 19 bp, Homo sapiens
ggggtccacctgcctttta

SEQ ID NO: 18441 - DNA, 19 bp, Homo sapiens
gggtccacctgccttttga

SEQ ID NO: 18442 - DNA, 19 bp, Homo sapiens
ggtccacctgccttttgta

SEQ ID NO: 18443 - DNA, 19 bp, Homo sapiens
gtccacctgccttttgtga

SEQ ID NO: 18444 - DNA, 19 bp, Homo sapiens
tccacctgccttttgtgga

SEQ ID NO: 18445 - DNA, 19 bp, Homo sapiens
ccacctgccttttgtggga

SEQ ID NO: 18446 - DNA, 19 bp, Homo sapiens
cacctgccttttgtgggca

SEQ ID NO: 18447 - DNA, 19 bp, Homo sapiens
cctgccttttgtgggctaa

SEQ ID NO: 18448 - DNA, 19 bp, Homo sapiens
ctgccttttgtgggctaca

SEQ ID NO: 18449 - DNA, 19 bp, Homo sapiens
tgccttttgtgggctacta

SEQ ID NO: 18450 - DNA, 19 bp, Homo sapiens
gccttttgtgggctactca

SEQ ID NO: 18451 - DNA, 19 bp, Homo sapiens
ccttttgtgggctactcca

SEQ ID NO: 18452 - DNA, 19 bp, Homo sapiens
ttttgtgggctactcctaa

SEQ ID NO: 18453 - DNA, 19 bp, Homo sapiens
tttgtgggctactcctaca

SEQ ID NO: 18454 - DNA, 19 bp, Homo sapiens
ttgtgggctactcctacta

SEQ ID NO: 18455 - DNA, 19 bp, Homo sapiens
tgtgggctactcctactca

SEQ ID NO: 18456 - DNA, 19 bp, Homo sapiens
gtgggctactcctactcca

SEQ ID NO: 18457 - DNA, 19 bp, Homo sapiens
tgggctactcctactccta

SEQ ID NO: 18458 - DNA, 19 bp, Homo sapiens
gggctactcctactcctga

SEQ ID NO: 18459 - DNA, 19 bp, Homo sapiens
gctactcctactcctgcaa

SEQ ID NO: 18460 - DNA, 19 bp, Homo sapiens
ctactcctactcctgcata

SEQ ID NO: 18461 - DNA, 19 bp, Homo sapiens
tactcctactcctgcatga

SEQ ID NO: 18462 - DNA, 19 bp, Homo sapiens
actcctactcctgcatgga

SEQ ID NO: 18463 - DNA, 19 bp, Homo sapiens
ctcctactcctgcatggca

SEQ ID NO: 18464 - DNA, 19 bp, Homo sapiens
tcctactcctgcatggcca

SEQ ID NO: 18465 - DNA, 19 bp, Homo sapiens
cctactcctgcatggccca

SEQ ID NO: 18466 - DNA, 19 bp, Homo sapiens
ctactcctgcatggcccta

SEQ ID NO: 18467 - DNA, 19 bp, Homo sapiens
actcctgcatggccctcaa

SEQ ID NO: 18468 - DNA, 19 bp, Homo sapiens
ctcctgcatggccctcaga

SEQ ID NO: 18469 - DNA, 19 bp, Homo sapiens
tcctgcatggccctcagga

SEQ ID NO: 18470 - DNA, 19 bp, Homo sapiens
ctgcatggccctcagggaa

SEQ ID NO: 18471 - DNA, 19 bp, Homo sapiens
gcatggccctcagggacaa

SEQ ID NO: 18472 - DNA, 19 bp, Homo sapiens
catggccctcagggacaga

SEQ ID NO: 18473 - DNA, 19 bp, Homo sapiens
atggccctcagggacagta

SEQ ID NO: 18474 - DNA, 19 bp, Homo sapiens
ggccctcagggacagtgaa

SEQ ID NO: 18475 - DNA, 19 bp, Homo sapiens
gccctcagggacagtgaga

SEQ ID NO: 18476 - DNA, 19 bp, Homo sapiens
ccctcagggacagtgagga

SEQ ID NO: 18477 - DNA, 19 bp, Homo sapiens
cctcagggacagtgaggta

SEQ ID NO: 18478 - DNA, 19 bp, Homo sapiens
ctcagggacagtgaggtca

SEQ ID NO: 18479 - DNA, 19 bp, Homo sapiens
tcagggacagtgaggtcca

SEQ ID NO: 18480 - DNA, 19 bp, Homo sapiens
agggacagtgaggtcccaa

SEQ ID NO: 18481 - DNA, 19 bp, Homo sapiens
gggacagtgaggtcccaga

SEQ ID NO: 18482 - DNA, 19 bp, Homo sapiens
ggacagtgaggtcccagga

SEQ ID NO: 18483 - DNA, 19 bp, Homo sapiens
gacagtgaggtcccaggca

SEQ ID NO: 18484 - DNA, 19 bp, Homo sapiens
acagtgaggtcccaggcca

SEQ ID NO: 18485 - DNA, 19 bp, Homo sapiens
cagtgaggtcccaggccca

SEQ ID NO: 18486 - DNA, 19 bp, Homo sapiens
gtgaggtcccaggccccaa

SEQ ID NO: 18487 - DNA, 19 bp, Homo sapiens
gaggtcccaggccccacaa

SEQ ID NO: 18488 - DNA, 19 bp, Homo sapiens
aggtcccaggccccacaca

SEQ ID NO: 18489 - DNA, 19 bp, Homo sapiens
ggtcccaggccccacacca

SEQ ID NO: 18490 - DNA, 19 bp, Homo sapiens
tcccaggccccacacccaa

SEQ ID NO: 18491 - DNA, 19 bp, Homo sapiens
cccaggccccacacccata

SEQ ID NO: 18492 - DNA, 19 bp, Homo sapiens
ccaggccccacacccatga

SEQ ID NO: 18493 - DNA, 19 bp, Homo sapiens
ggccccacacccatggaaa

SEQ ID NO: 18494 - DNA, 19 bp, Homo sapiens
gccccacacccatggaaca

SEQ ID NO: 18495 - DNA, 19 bp, Homo sapiens
ccccacacccatggaacta

SEQ ID NO: 18496 - DNA, 19 bp, Homo sapiens
cccacacccatggaactga

SEQ ID NO: 18497 - DNA, 19 bp, Homo sapiens
cacacccatggaactggaa

SEQ ID NO: 18498 - DNA, 19 bp, Homo sapiens
acacccatggaactggaga

SEQ ID NO: 18499 - DNA, 19 bp, Homo sapiens
cacccatggaactggagga

SEQ ID NO: 18500 - DNA, 19 bp, Homo sapiens
acccatggaactggaggca

SEQ ID NO: 18501 - DNA, 19 bp, Homo sapiens
cccatggaactggaggcca

SEQ ID NO: 18502 - DNA, 19 bp, Homo sapiens
catggaactggaggccgaa

SEQ ID NO: 18503 - DNA, 19 bp, Homo sapiens
atggaactggaggccgaga

SEQ ID NO: 18504 - DNA, 19 bp, Homo sapiens
ggaactggaggccgagcaa

SEQ ID NO: 18505 - DNA, 19 bp, Homo sapiens
gaactggaggccgagcaga

SEQ ID NO: 18506 - DNA, 19 bp, Homo sapiens
aactggaggccgagcagca

SEQ ID NO: 18507 - DNA, 19 bp, Homo sapiens
actggaggccgagcagcta

SEQ ID NO: 18508 - DNA, 19 bp, Homo sapiens
ctggaggccgagcagctga

SEQ ID NO: 18509 - DNA, 19 bp, Homo sapiens
tggaggccgagcagctgca

SEQ ID NO: 18510 - DNA, 19 bp, Homo sapiens
ggaggccgagcagctgcta

SEQ ID NO: 18511 - DNA, 19 bp, Homo sapiens
gaggccgagcagctgctta

SEQ ID NO: 18512 - DNA, 19 bp, Homo sapiens
ggccgagcagctgcttgaa

SEQ ID NO: 18513 - DNA, 19 bp, Homo sapiens
gccgagcagctgcttgaga

SEQ ID NO: 18514 - DNA, 19 bp, Homo sapiens
ccgagcagctgcttgagca

SEQ ID NO: 18515 - DNA, 19 bp, Homo sapiens
gagcagctgcttgagccaa

SEQ ID NO: 18516 - DNA, 19 bp, Homo sapiens
gcagctgcttgagccacaa

SEQ ID NO: 18517 - DNA, 19 bp, Homo sapiens
cagctgcttgagccacaca

SEQ ID NO: 18518 - DNA, 19 bp, Homo sapiens
agctgcttgagccacacga

SEQ ID NO: 18519 - DNA, 19 bp, Homo sapiens
gctgcttgagccacacgta

SEQ ID NO: 18520 - DNA, 19 bp, Homo sapiens
ctgcttgagccacacgtga

SEQ ID NO: 18521 - DNA, 19 bp, Homo sapiens
cttgagccacacgtgcaaa

SEQ ID NO: 18522 - DNA, 19 bp, Homo sapiens
ttgagccacacgtgcaaga

SEQ ID NO: 18523 - DNA, 19 bp, Homo sapiens
tgagccacacgtgcaagca

SEQ ID NO: 18524 - DNA, 19 bp, Homo sapiens
gagccacacgtgcaagcga

SEQ ID NO: 18525 - DNA, 19 bp, Homo sapiens
agccacacgtgcaagcgca

SEQ ID NO: 18526 - DNA, 19 bp, Homo sapiens
gccacacgtgcaagcgcca

SEQ ID NO: 18527 - DNA, 19 bp, Homo sapiens
cacacgtgcaagcgcccaa

SEQ ID NO: 18528 - DNA, 19 bp, Homo sapiens
acacgtgcaagcgcccaga

SEQ ID NO: 18529 - DNA, 19 bp, Homo sapiens
cacgtgcaagcgcccagca

SEQ ID NO: 18530 - DNA, 19 bp, Homo sapiens
acgtgcaagcgcccagcca

SEQ ID NO: 18531 - DNA, 19 bp, Homo sapiens
cgtgcaagcgcccagccta

SEQ ID NO: 18532 - DNA, 19 bp, Homo sapiens
gtgcaagcgcccagcctga

SEQ ID NO: 18533 - DNA, 19 bp, Homo sapiens
gcaagcgcccagcctggaa

SEQ ID NO: 18534 - DNA, 19 bp, Homo sapiens
caagcgcccagcctggaga

SEQ ID NO: 18535 - DNA, 19 bp, Homo sapiens
aagcgcccagcctggagca

SEQ ID NO: 18536 - DNA, 19 bp, Homo sapiens
agcgcccagcctggagcca

SEQ ID NO: 18537 - DNA, 19 bp, Homo sapiens
gcgcccagcctggagccca

SEQ ID NO: 18538 - DNA, 19 bp, Homo sapiens
cgcccagcctggagcccta

SEQ ID NO: 18539 - DNA, 19 bp, Homo sapiens
gcccagcctggagccctca

SEQ ID NO: 18540 - DNA, 19 bp, Homo sapiens
cccagcctggagccctcga

SEQ ID NO: 18541 - DNA, 19 bp, Homo sapiens
ccagcctggagccctcgga

SEQ ID NO: 18542 - DNA, 19 bp, Homo sapiens
cagcctggagccctcggta

SEQ ID NO: 18543 - DNA, 19 bp, Homo sapiens
agcctggagccctcggtga

SEQ ID NO: 18544 - DNA, 19 bp, Homo sapiens
gcctggagccctcggtgta

SEQ ID NO: 18545 - DNA, 19 bp, Homo sapiens
cctggagccctcggtgtca

SEQ ID NO: 18546 - DNA, 19 bp, Homo sapiens
ctggagccctcggtgtcca

SEQ ID NO: 18547 - DNA, 19 bp, Homo sapiens
tggagccctcggtgtccca

SEQ ID NO: 18548 - DNA, 19 bp, Homo sapiens
gagccctcggtgtccccaa

SEQ ID NO: 18549 - DNA, 19 bp, Homo sapiens
gccctcggtgtccccacaa

SEQ ID NO: 18550 - DNA, 19 bp, Homo sapiens
ccctcggtgtccccacaga

SEQ ID NO: 18551 - DNA, 19 bp, Homo sapiens
ctcggtgtccccacaggaa

SEQ ID NO: 18552 - DNA, 19 bp, Homo sapiens
tcggtgtccccacaggata

SEQ ID NO: 18553 - DNA, 19 bp, Homo sapiens
tgtccccacaggatgaaaa

SEQ ID NO: 18554 - DNA, 19 bp, Homo sapiens
tccccacaggatgaaacaa

SEQ ID NO: 18555 - DNA, 19 bp, Homo sapiens
ccccacaggatgaaacaga

SEQ ID NO: 18556 - DNA, 19 bp, Homo sapiens
cccacaggatgaaacagca

SEQ ID NO: 18557 - DNA, 19 bp, Homo sapiens
ccacaggatgaaacagcta

SEQ ID NO: 18558 - DNA, 19 bp, Homo sapiens
caggatgaaacagctgaaa

SEQ ID NO: 18559 - DNA, 19 bp, Homo sapiens
aggatgaaacagctgaaga

SEQ ID NO: 18560 - DNA, 19 bp, Homo sapiens
ggatgaaacagctgaagta

SEQ ID NO: 18561 - DNA, 19 bp, Homo sapiens
gatgaaacagctgaagtga

SEQ ID NO: 18562 - DNA, 19 bp, Homo sapiens
atgaaacagctgaagtgga

SEQ ID NO: 18563 - DNA, 19 bp, Homo sapiens
gaaacagctgaagtggcaa

SEQ ID NO: 18564 - DNA, 19 bp, Homo sapiens
aaacagctgaagtggcaga

SEQ ID NO: 18565 - DNA, 19 bp, Homo sapiens
aacagctgaagtggcagta

SEQ ID NO: 18566 - DNA, 19 bp, Homo sapiens
acagctgaagtggcagtta

SEQ ID NO: 18567 - DNA, 19 bp, Homo sapiens
cagctgaagtggcagttca

SEQ ID NO: 18568 - DNA, 19 bp, Homo sapiens
gctgaagtggcagttccaa

SEQ ID NO: 18569 - DNA, 19 bp, Homo sapiens
ctgaagtggcagttccaga

SEQ ID NO: 18570 - DNA, 19 bp, Homo sapiens
tgaagtggcagttccagca

SEQ ID NO: 18571 - DNA, 19 bp, Homo sapiens
gaagtggcagttccagcga

SEQ ID NO: 18572 - DNA, 19 bp, Homo sapiens
aagtggcagttccagcgga

SEQ ID NO: 18573 - DNA, 19 bp, Homo sapiens
agtggcagttccagcggca

SEQ ID NO: 18574 - DNA, 19 bp, Homo sapiens
gtggcagttccagcggcta

SEQ ID NO: 18575 - DNA, 19 bp, Homo sapiens
tggcagttccagcggctga

SEQ ID NO: 18576 - DNA, 19 bp, Homo sapiens
ggcagttccagcggctgta

SEQ ID NO: 18577 - DNA, 19 bp, Homo sapiens
gcagttccagcggctgtca

SEQ ID NO: 18578 - DNA, 19 bp, Homo sapiens
cagttccagcggctgtcca

SEQ ID NO: 18579 - DNA, 19 bp, Homo sapiens
agttccagcggctgtccca

SEQ ID NO: 18580 - DNA, 19 bp, Homo sapiens
gttccagcggctgtcccta

SEQ ID NO: 18581 - DNA, 19 bp, Homo sapiens
ttccagcggctgtccctga

SEQ ID NO: 18582 - DNA, 19 bp, Homo sapiens
tccagcggctgtccctgca

SEQ ID NO: 18583 - DNA, 19 bp, Homo sapiens
ccagcggctgtccctgcga

SEQ ID NO: 18584 - DNA, 19 bp, Homo sapiens
cagcggctgtccctgcgga

SEQ ID NO: 18585 - DNA, 19 bp, Homo sapiens
gcggctgtccctgcggcaa

SEQ ID NO: 18586 - DNA, 19 bp, Homo sapiens
ggctgtccctgcggcagaa

SEQ ID NO: 18587 - DNA, 19 bp, Homo sapiens
gctgtccctgcggcagaga

SEQ ID NO: 18588 - DNA, 19 bp, Homo sapiens
ctgtccctgcggcagagga

SEQ ID NO: 18589 - DNA, 19 bp, Homo sapiens
tgtccctgcggcagaggca

SEQ ID NO: 18590 - DNA, 19 bp, Homo sapiens
gtccctgcggcagaggcta

SEQ ID NO: 18591 - DNA, 19 bp, Homo sapiens
ccctgcggcagaggctgaa

SEQ ID NO: 18592 - DNA, 19 bp, Homo sapiens
cctgcggcagaggctgaga

SEQ ID NO: 18593 - DNA, 19 bp, Homo sapiens
ctgcggcagaggctgagga

SEQ ID NO: 18594 - DNA, 19 bp, Homo sapiens
tgcggcagaggctgaggca

SEQ ID NO: 18595 - DNA, 19 bp, Homo sapiens
gcggcagaggctgaggcca

SEQ ID NO: 18596 - DNA, 19 bp, Homo sapiens
ggcagaggctgaggccgaa

SEQ ID NO: 18597 - DNA, 19 bp, Homo sapiens
gcagaggctgaggccgaga

SEQ ID NO: 18598 - DNA, 19 bp, Homo sapiens
cagaggctgaggccgagga

SEQ ID NO: 18599 - DNA, 19 bp, Homo sapiens
agaggctgaggccgaggta

SEQ ID NO: 18600 - DNA, 19 bp, Homo sapiens
aggctgaggccgaggtgaa

SEQ ID NO: 18601 - DNA, 19 bp, Homo sapiens
ggctgaggccgaggtgaca

SEQ ID NO: 18602 - DNA, 19 bp, Homo sapiens
gctgaggccgaggtgacga

SEQ ID NO: 18603 - DNA, 19 bp, Homo sapiens
ctgaggccgaggtgacgca

SEQ ID NO: 18604 - DNA, 19 bp, Homo sapiens
tgaggccgaggtgacgcta

SEQ ID NO: 18605 - DNA, 19 bp, Homo sapiens
gaggccgaggtgacgctga

SEQ ID NO: 18606 - DNA, 19 bp, Homo sapiens
aggccgaggtgacgctgca

SEQ ID NO: 18607 - DNA, 19 bp, Homo sapiens
ggccgaggtgacgctgcga

SEQ ID NO: 18608 - DNA, 19 bp, Homo sapiens
gccgaggtgacgctgcgga

SEQ ID NO: 18609 - DNA, 19 bp, Homo sapiens
cgaggtgacgctgcgggaa

SEQ ID NO: 18610 - DNA, 19 bp, Homo sapiens
gaggtgacgctgcgggaga

SEQ ID NO: 18611 - DNA, 19 bp, Homo sapiens
aggtgacgctgcgggagca

SEQ ID NO: 18612 - DNA, 19 bp, Homo sapiens
ggtgacgctgcgggagcta

SEQ ID NO: 18613 - DNA, 19 bp, Homo sapiens
gtgacgctgcgggagctca

SEQ ID NO: 18614 - DNA, 19 bp, Homo sapiens
gacgctgcgggagctccaa

SEQ ID NO: 18615 - DNA, 19 bp, Homo sapiens
acgctgcgggagctccaga

SEQ ID NO: 18616 - DNA, 19 bp, Homo sapiens
ctgcgggagctccaggaaa

SEQ ID NO: 18617 - DNA, 19 bp, Homo sapiens
tgcgggagctccaggaaga

SEQ ID NO: 18618 - DNA, 19 bp, Homo sapiens
gcgggagctccaggaagca

SEQ ID NO: 18619 - DNA, 19 bp, Homo sapiens
cgggagctccaggaagcca

SEQ ID NO: 18620 - DNA, 19 bp, Homo sapiens
gggagctccaggaagccca

SEQ ID NO: 18621 - DNA, 19 bp, Homo sapiens
ggagctccaggaagcccta

SEQ ID NO: 18622 - DNA, 19 bp, Homo sapiens
gagctccaggaagccctga

SEQ ID NO: 18623 - DNA, 19 bp, Homo sapiens
gctccaggaagccctggaa

SEQ ID NO: 18624 - DNA, 19 bp, Homo sapiens
ctccaggaagccctggaga

SEQ ID NO: 18625 - DNA, 19 bp, Homo sapiens
ccaggaagccctggaggaa

SEQ ID NO: 18626 - DNA, 19 bp, Homo sapiens
caggaagccctggaggaga

SEQ ID NO: 18627 - DNA, 19 bp, Homo sapiens
ggaagccctggaggaggaa

SEQ ID NO: 18628 - DNA, 19 bp, Homo sapiens
gaagccctggaggaggaga

SEQ ID NO: 18629 - DNA, 19 bp, Homo sapiens
aagccctggaggaggagga

SEQ ID NO: 18630 - DNA, 19 bp, Homo sapiens
agccctggaggaggaggta

SEQ ID NO: 18631 - DNA, 19 bp, Homo sapiens
gccctggaggaggaggtga

SEQ ID NO: 18632 - DNA, 19 bp, Homo sapiens
ccctggaggaggaggtgca

SEQ ID NO: 18633 - DNA, 19 bp, Homo sapiens
cctggaggaggaggtgcta

SEQ ID NO: 18634 - DNA, 19 bp, Homo sapiens
tggaggaggaggtgctcaa

SEQ ID NO: 18635 - DNA, 19 bp, Homo sapiens
ggaggaggaggtgctcaca

SEQ ID NO: 18636 - DNA, 19 bp, Homo sapiens
gaggaggaggtgctcacca

SEQ ID NO: 18637 - DNA, 19 bp, Homo sapiens
aggaggaggtgctcaccca

SEQ ID NO: 18638 - DNA, 19 bp, Homo sapiens
ggaggaggtgctcacccga

SEQ ID NO: 18639 - DNA, 19 bp, Homo sapiens
gaggaggtgctcacccgga

SEQ ID NO: 18640 - DNA, 19 bp, Homo sapiens
ggaggtgctcacccggcaa

SEQ ID NO: 18641 - DNA, 19 bp, Homo sapiens
aggtgctcacccggcagaa

SEQ ID NO: 18642 - DNA, 19 bp, Homo sapiens
ggtgctcacccggcagaga

SEQ ID NO: 18643 - DNA, 19 bp, Homo sapiens
gtgctcacccggcagagca

SEQ ID NO: 18644 - DNA, 19 bp, Homo sapiens
tgctcacccggcagagcca

SEQ ID NO: 18645 - DNA, 19 bp, Homo sapiens
gctcacccggcagagccta

SEQ ID NO: 18646 - DNA, 19 bp, Homo sapiens
tcacccggcagagcctgaa

SEQ ID NO: 18647 - DNA, 19 bp, Homo sapiens
cacccggcagagcctgaga

SEQ ID NO: 18648 - DNA, 19 bp, Homo sapiens
acccggcagagcctgagca

SEQ ID NO: 18649 - DNA, 19 bp, Homo sapiens
cccggcagagcctgagcca

SEQ ID NO: 18650 - DNA, 19 bp, Homo sapiens
ccggcagagcctgagccga

SEQ ID NO: 18651 - DNA, 19 bp, Homo sapiens
cggcagagcctgagccgga

SEQ ID NO: 18652 - DNA, 19 bp, Homo sapiens
gcagagcctgagccgggaa

SEQ ID NO: 18653 - DNA, 19 bp, Homo sapiens
agagcctgagccgggagaa

SEQ ID NO: 18654 - DNA, 19 bp, Homo sapiens
gagcctgagccgggagata

SEQ ID NO: 18655 - DNA, 19 bp, Homo sapiens
agcctgagccgggagatga

SEQ ID NO: 18656 - DNA, 19 bp, Homo sapiens
cctgagccgggagatggaa

SEQ ID NO: 18657 - DNA, 19 bp, Homo sapiens
ctgagccgggagatggaga

SEQ ID NO: 18658 - DNA, 19 bp, Homo sapiens
tgagccgggagatggagga

SEQ ID NO: 18659 - DNA, 19 bp, Homo sapiens
gagccgggagatggaggca

SEQ ID NO: 18660 - DNA, 19 bp, Homo sapiens
gccgggagatggaggccaa

SEQ ID NO: 18661 - DNA, 19 bp, Homo sapiens
ccgggagatggaggccata

SEQ ID NO: 18662 - DNA, 19 bp, Homo sapiens
cgggagatggaggccatca

SEQ ID NO: 18663 - DNA, 19 bp, Homo sapiens
gggagatggaggccatcca

SEQ ID NO: 18664 - DNA, 19 bp, Homo sapiens
ggagatggaggccatccga

SEQ ID NO: 18665 - DNA, 19 bp, Homo sapiens
agatggaggccatccgcaa

SEQ ID NO: 18666 - DNA, 19 bp, Homo sapiens
gatggaggccatccgcaca

SEQ ID NO: 18667 - DNA, 19 bp, Homo sapiens
atggaggccatccgcacga

SEQ ID NO: 18668 - DNA, 19 bp, Homo sapiens
ggaggccatccgcacggaa

SEQ ID NO: 18669 - DNA, 19 bp, Homo sapiens
ggccatccgcacggacaaa

SEQ ID NO: 18670 - DNA, 19 bp, Homo sapiens
gccatccgcacggacaaca

SEQ ID NO: 18671 - DNA, 19 bp, Homo sapiens
catccgcacggacaaccaa

SEQ ID NO: 18672 - DNA, 19 bp, Homo sapiens
ccgcacggacaaccagaaa

SEQ ID NO: 18673 - DNA, 19 bp, Homo sapiens
cgcacggacaaccagaaca

SEQ ID NO: 18674 - DNA, 19 bp, Homo sapiens
gcacggacaaccagaacta

SEQ ID NO: 18675 - DNA, 19 bp, Homo sapiens
cacggacaaccagaactta

SEQ ID NO: 18676 - DNA, 19 bp, Homo sapiens
acggacaaccagaacttca

SEQ ID NO: 18677 - DNA, 19 bp, Homo sapiens
cggacaaccagaacttcga

SEQ ID NO: 18678 - DNA, 19 bp, Homo sapiens
ggacaaccagaacttcgca

SEQ ID NO: 18679 - DNA, 19 bp, Homo sapiens
acaaccagaacttcgccaa

SEQ ID NO: 18680 - DNA, 19 bp, Homo sapiens
caaccagaacttcgccaga

SEQ ID NO: 18681 - DNA, 19 bp, Homo sapiens
aaccagaacttcgccagta

SEQ ID NO: 18682 - DNA, 19 bp, Homo sapiens
cagaacttcgccagtcaaa

SEQ ID NO: 18683 - DNA, 19 bp, Homo sapiens
agaacttcgccagtcaaca

SEQ ID NO: 18684 - DNA, 19 bp, Homo sapiens
aacttcgccagtcaactaa

SEQ ID NO: 18685 - DNA, 19 bp, Homo sapiens
acttcgccagtcaactaca

SEQ ID NO: 18686 - DNA, 19 bp, Homo sapiens
cttcgccagtcaactacga

SEQ ID NO: 18687 - DNA, 19 bp, Homo sapiens
ttcgccagtcaactacgca

SEQ ID NO: 18688 - DNA, 19 bp, Homo sapiens
cgccagtcaactacgcgaa

SEQ ID NO: 18689 - DNA, 19 bp, Homo sapiens
gccagtcaactacgcgaga

SEQ ID NO: 18690 - DNA, 19 bp, Homo sapiens
ccagtcaactacgcgagga

SEQ ID NO: 18691 - DNA, 19 bp, Homo sapiens
agtcaactacgcgaggcaa

SEQ ID NO: 18692 - DNA, 19 bp, Homo sapiens
tcaactacgcgaggcagaa

SEQ ID NO: 18693 - DNA, 19 bp, Homo sapiens
caactacgcgaggcagaga

SEQ ID NO: 18694 - DNA, 19 bp, Homo sapiens
aactacgcgaggcagagga

SEQ ID NO: 18695 - DNA, 19 bp, Homo sapiens
actacgcgaggcagaggca

SEQ ID NO: 18696 - DNA, 19 bp, Homo sapiens
ctacgcgaggcagaggcta

SEQ ID NO: 18697 - DNA, 19 bp, Homo sapiens
tacgcgaggcagaggctca

SEQ ID NO: 18698 - DNA, 19 bp, Homo sapiens
acgcgaggcagaggctcga

SEQ ID NO: 18699 - DNA, 19 bp, Homo sapiens
cgaggcagaggctcggaaa

SEQ ID NO: 18700 - DNA, 19 bp, Homo sapiens
gaggcagaggctcggaaca

SEQ ID NO: 18701 - DNA, 19 bp, Homo sapiens
aggcagaggctcggaacca

SEQ ID NO: 18702 - DNA, 19 bp, Homo sapiens
ggcagaggctcggaaccga

SEQ ID NO: 18703 - DNA, 19 bp, Homo sapiens
gcagaggctcggaaccgga

SEQ ID NO: 18704 - DNA, 19 bp, Homo sapiens
agaggctcggaaccgggaa

SEQ ID NO: 18705 - DNA, 19 bp, Homo sapiens
gaggctcggaaccgggaca

SEQ ID NO: 18706 - DNA, 19 bp, Homo sapiens
aggctcggaaccgggacca

SEQ ID NO: 18707 - DNA, 19 bp, Homo sapiens
gctcggaaccgggacctaa

SEQ ID NO: 18708 - DNA, 19 bp, Homo sapiens
tcggaaccgggacctagaa

SEQ ID NO: 18709 - DNA, 19 bp, Homo sapiens
cggaaccgggacctagaga

SEQ ID NO: 18710 - DNA, 19 bp, Homo sapiens
ggaaccgggacctagagga

SEQ ID NO: 18711 - DNA, 19 bp, Homo sapiens
aaccgggacctagaggcaa

SEQ ID NO: 18712 - DNA, 19 bp, Homo sapiens
ccgggacctagaggcacaa

SEQ ID NO: 18713 - DNA, 19 bp, Homo sapiens
cgggacctagaggcacaca

SEQ ID NO: 18714 - DNA, 19 bp, Homo sapiens
gggacctagaggcacacga

SEQ ID NO: 18715 - DNA, 19 bp, Homo sapiens
ggacctagaggcacacgta

SEQ ID NO: 18716 - DNA, 19 bp, Homo sapiens
gacctagaggcacacgtca

SEQ ID NO: 18717 - DNA, 19 bp, Homo sapiens
acctagaggcacacgtcca

SEQ ID NO: 18718 - DNA, 19 bp, Homo sapiens
cctagaggcacacgtccga

SEQ ID NO: 18719 - DNA, 19 bp, Homo sapiens
ctagaggcacacgtccgga

SEQ ID NO: 18720 - DNA, 19 bp, Homo sapiens
agaggcacacgtccggcaa

SEQ ID NO: 18721 - DNA, 19 bp, Homo sapiens
gaggcacacgtccggcaga

SEQ ID NO: 18722 - DNA, 19 bp, Homo sapiens
aggcacacgtccggcagta

SEQ ID NO: 18723 - DNA, 19 bp, Homo sapiens
ggcacacgtccggcagtta

SEQ ID NO: 18724 - DNA, 19 bp, Homo sapiens
gcacacgtccggcagttga

SEQ ID NO: 18725 - DNA, 19 bp, Homo sapiens
acacgtccggcagttgcaa

SEQ ID NO: 18726 - DNA, 19 bp, Homo sapiens
cacgtccggcagttgcaga

SEQ ID NO: 18727 - DNA, 19 bp, Homo sapiens
cgtccggcagttgcaggaa

SEQ ID NO: 18728 - DNA, 19 bp, Homo sapiens
gtccggcagttgcaggaga

SEQ ID NO: 18729 - DNA, 19 bp, Homo sapiens
tccggcagttgcaggagca

SEQ ID NO: 18730 - DNA, 19 bp, Homo sapiens
ccggcagttgcaggagcga

SEQ ID NO: 18731 - DNA, 19 bp, Homo sapiens
ggcagttgcaggagcggaa

SEQ ID NO: 18732 - DNA, 19 bp, Homo sapiens
gcagttgcaggagcggata

SEQ ID NO: 18733 - DNA, 19 bp, Homo sapiens
cagttgcaggagcggatga

SEQ ID NO: 18734 - DNA, 19 bp, Homo sapiens
gttgcaggagcggatggaa

SEQ ID NO: 18735 - DNA, 19 bp, Homo sapiens
ttgcaggagcggatggaga

SEQ ID NO: 18736 - DNA, 19 bp, Homo sapiens
tgcaggagcggatggagta

SEQ ID NO: 18737 - DNA, 19 bp, Homo sapiens
gcaggagcggatggagtta

SEQ ID NO: 18738 - DNA, 19 bp, Homo sapiens
caggagcggatggagttga

SEQ ID NO: 18739 - DNA, 19 bp, Homo sapiens
aggagcggatggagttgca

SEQ ID NO: 18740 - DNA, 19 bp, Homo sapiens
ggagcggatggagttgcta

SEQ ID NO: 18741 - DNA, 19 bp, Homo sapiens
gagcggatggagttgctga

SEQ ID NO: 18742 - DNA, 19 bp, Homo sapiens
gcggatggagttgctgcaa

SEQ ID NO: 18743 - DNA, 19 bp, Homo sapiens
cggatggagttgctgcaga

SEQ ID NO: 18744 - DNA, 19 bp, Homo sapiens
ggatggagttgctgcagga

SEQ ID NO: 18745 - DNA, 19 bp, Homo sapiens
atggagttgctgcaggcaa

SEQ ID NO: 18746 - DNA, 19 bp, Homo sapiens
ggagttgctgcaggcagaa

SEQ ID NO: 18747 - DNA, 19 bp, Homo sapiens
gagttgctgcaggcagaga

SEQ ID NO: 18748 - DNA, 19 bp, Homo sapiens
agttgctgcaggcagagga

SEQ ID NO: 18749 - DNA, 19 bp, Homo sapiens
ttgctgcaggcagagggaa

SEQ ID NO: 18750 - DNA, 19 bp, Homo sapiens
tgctgcaggcagagggaga

SEQ ID NO: 18751 - DNA, 19 bp, Homo sapiens
gctgcaggcagagggagca

SEQ ID NO: 18752 - DNA, 19 bp, Homo sapiens
tgcaggcagagggagccaa

SEQ ID NO: 18753 - DNA, 19 bp, Homo sapiens
caggcagagggagccacaa

SEQ ID NO: 18754 - DNA, 19 bp, Homo sapiens
aggcagagggagccacaga

SEQ ID NO: 18755 - DNA, 19 bp, Homo sapiens
ggcagagggagccacagga

SEQ ID NO: 18756 - DNA, 19 bp, Homo sapiens
gcagagggagccacaggta

SEQ ID NO: 18757 - DNA, 19 bp, Homo sapiens
cagagggagccacaggtca

SEQ ID NO: 18758 - DNA, 19 bp, Homo sapiens
agagggagccacaggtcca

SEQ ID NO: 18759 - DNA, 19 bp, Homo sapiens
gagggagccacaggtccca

SEQ ID NO: 18760 - DNA, 19 bp, Homo sapiens
gggagccacaggtccctaa

SEQ ID NO: 18761 - DNA, 19 bp, Homo sapiens
ggagccacaggtccctaga

SEQ ID NO: 18762 - DNA, 19 bp, Homo sapiens
gagccacaggtccctagga

SEQ ID NO: 18763 - DNA, 19 bp, Homo sapiens
agccacaggtccctaggca

SEQ ID NO: 18764 - DNA, 19 bp, Homo sapiens
gccacaggtccctaggcca

SEQ ID NO: 18765 - DNA, 19 bp, Homo sapiens
ccacaggtccctaggccta

SEQ ID NO: 18766 - DNA, 19 bp, Homo sapiens
cacaggtccctaggcctga

SEQ ID NO: 18767 - DNA, 19 bp, Homo sapiens
acaggtccctaggcctgga

SEQ ID NO: 18768 - DNA, 19 bp, Homo sapiens
caggtccctaggcctggca

SEQ ID NO: 18769 - DNA, 19 bp, Homo sapiens
aggtccctaggcctggcca

SEQ ID NO: 18770 - DNA, 19 bp, Homo sapiens
gtccctaggcctggcctaa

SEQ ID NO: 18771 - DNA, 19 bp, Homo sapiens
tccctaggcctggcctata

SEQ ID NO: 18772 - DNA, 19 bp, Homo sapiens
ccctaggcctggcctatca

SEQ ID NO: 18773 - DNA, 19 bp, Homo sapiens
cctaggcctggcctatcga

SEQ ID NO: 18774 - DNA, 19 bp, Homo sapiens
taggcctggcctatcggaa

SEQ ID NO: 18775 - DNA, 19 bp, Homo sapiens
aggcctggcctatcggaga

SEQ ID NO: 18776 - DNA, 19 bp, Homo sapiens
ggcctggcctatcggagga

SEQ ID NO: 18777 - DNA, 19 bp, Homo sapiens
gcctggcctatcggaggca

SEQ ID NO: 18778 - DNA, 19 bp, Homo sapiens
cctggcctatcggaggcga

SEQ ID NO: 18779 - DNA, 19 bp, Homo sapiens
ctggcctatcggaggcgca

SEQ ID NO: 18780 - DNA, 19 bp, Homo sapiens
tggcctatcggaggcgcta

SEQ ID NO: 18781 - DNA, 19 bp, Homo sapiens
ggcctatcggaggcgctta

SEQ ID NO: 18782 - DNA, 19 bp, Homo sapiens
gcctatcggaggcgcttta

SEQ ID NO: 18783 - DNA, 19 bp, Homo sapiens
cctatcggaggcgctttca

SEQ ID NO: 18784 - DNA, 19 bp, Homo sapiens
ctatcggaggcgctttcca

SEQ ID NO: 18785 - DNA, 19 bp, Homo sapiens
tatcggaggcgctttccca

SEQ ID NO: 18786 - DNA, 19 bp, Homo sapiens
atcggaggcgctttcccta

SEQ ID NO: 18787 - DNA, 19 bp, Homo sapiens
tcggaggcgctttccctga

SEQ ID NO: 18788 - DNA, 19 bp, Homo sapiens
cggaggcgctttccctgca

SEQ ID NO: 18789 - DNA, 19 bp, Homo sapiens
ggaggcgctttccctgcta

SEQ ID NO: 18790 - DNA, 19 bp, Homo sapiens
gaggcgctttccctgctca

SEQ ID NO: 18791 - DNA, 19 bp, Homo sapiens
aggcgctttccctgctcca

SEQ ID NO: 18792 - DNA, 19 bp, Homo sapiens
ggcgctttccctgctccta

SEQ ID NO: 18793 - DNA, 19 bp, Homo sapiens
gcgctttccctgctcctga

SEQ ID NO: 18794 - DNA, 19 bp, Homo sapiens
cgctttccctgctcctgta

SEQ ID NO: 18795 - DNA, 19 bp, Homo sapiens
gctttccctgctcctgtta

SEQ ID NO: 18796 - DNA, 19 bp, Homo sapiens
ctttccctgctcctgttca

SEQ ID NO: 18797 - DNA, 19 bp, Homo sapiens
tttccctgctcctgttcga

SEQ ID NO: 18798 - DNA, 19 bp, Homo sapiens
ttccctgctcctgttcgca

SEQ ID NO: 18799 - DNA, 19 bp, Homo sapiens
tccctgctcctgttcgcca

SEQ ID NO: 18800 - DNA, 19 bp, Homo sapiens
ccctgctcctgttcgccga

SEQ ID NO: 18801 - DNA, 19 bp, Homo sapiens
cctgctcctgttcgccgta

SEQ ID NO: 18802 - DNA, 19 bp, Homo sapiens
ctgctcctgttcgccgtta

SEQ ID NO: 18803 - DNA, 19 bp, Homo sapiens
tgctcctgttcgccgttga

SEQ ID NO: 18804 - DNA, 19 bp, Homo sapiens
gctcctgttcgccgttgta

SEQ ID NO: 18805 - DNA, 19 bp, Homo sapiens
ctcctgttcgccgttgtta

SEQ ID NO: 18806 - DNA, 19 bp, Homo sapiens
tcctgttcgccgttgttca

SEQ ID NO: 18807 - DNA, 19 bp, Homo sapiens
cctgttcgccgttgttcta

SEQ ID NO: 18808 - DNA, 19 bp, Homo sapiens
ctgttcgccgttgttctga

SEQ ID NO: 18809 - DNA, 19 bp, Homo sapiens
tgttcgccgttgttctgta

SEQ ID NO: 18810 - DNA, 19 bp, Homo sapiens
gttcgccgttgttctgtca

SEQ ID NO: 18811 - DNA, 19 bp, Homo sapiens
ttcgccgttgttctgtcta

SEQ ID NO: 18812 - DNA, 19 bp, Homo sapiens
tcgccgttgttctgtctca

SEQ ID NO: 18813 - DNA, 19 bp, Homo sapiens
cgccgttgttctgtctcga

SEQ ID NO: 18814 - DNA, 19 bp, Homo sapiens
gccgttgttctgtctcgta

SEQ ID NO: 18815 - DNA, 19 bp, Homo sapiens
ccgttgttctgtctcgtga

SEQ ID NO: 18816 - DNA, 19 bp, Homo sapiens
cgttgttctgtctcgtgca

SEQ ID NO: 18817 - DNA, 19 bp, Homo sapiens
gttgttctgtctcgtgcca

SEQ ID NO: 18818 - DNA, 19 bp, Homo sapiens
ttgttctgtctcgtgccga

SEQ ID NO: 18819 - DNA, 19 bp, Homo sapiens
tgttctgtctcgtgccgca

SEQ ID NO: 18820 - DNA, 19 bp, Homo sapiens
gttctgtctcgtgccgcca

SEQ ID NO: 18821 - DNA, 19 bp, Homo sapiens
ttctgtctcgtgccgccga

SEQ ID NO: 18822 - DNA, 19 bp, Homo sapiens
tctgtctcgtgccgccgca

SEQ ID NO: 18823 - DNA, 19 bp, Homo sapiens
ctgtctcgtgccgccgcca

SEQ ID NO: 18824 - DNA, 19 bp, Homo sapiens
tgtctcgtgccgccgccca

SEQ ID NO: 18825 - DNA, 19 bp, Homo sapiens
gtctcgtgccgccgcccta

SEQ ID NO: 18826 - DNA, 19 bp, Homo sapiens
tctcgtgccgccgccctga

SEQ ID NO: 18827 - DNA, 19 bp, Homo sapiens
ctcgtgccgccgccctgga

SEQ ID NO: 18828 - DNA, 19 bp, Homo sapiens
tcgtgccgccgccctggga

SEQ ID NO: 18829 - DNA, 19 bp, Homo sapiens
cgtgccgccgccctgggca

SEQ ID NO: 18830 - DNA, 19 bp, Homo sapiens
gtgccgccgccctgggcta

SEQ ID NO: 18831 - DNA, 19 bp, Homo sapiens
tgccgccgccctgggctga

SEQ ID NO: 18832 - DNA, 19 bp, Homo sapiens
ccgccgccctgggctgcaa

SEQ ID NO: 18833 - DNA, 19 bp, Homo sapiens
cgccgccctgggctgcata

SEQ ID NO: 18834 - DNA, 19 bp, Homo sapiens
gccgccctgggctgcatta

SEQ ID NO: 18835 - DNA, 19 bp, Homo sapiens
ccgccctgggctgcattga

SEQ ID NO: 18836 - DNA, 19 bp, Homo sapiens
cgccctgggctgcattgga

SEQ ID NO: 18837 - DNA, 19 bp, Homo sapiens
gccctgggctgcattggga

SEQ ID NO: 18838 - DNA, 19 bp, Homo sapiens
ccctgggctgcattgggta

SEQ ID NO: 18839 - DNA, 19 bp, Homo sapiens
cctgggctgcattgggtta

SEQ ID NO: 18840 - DNA, 19 bp, Homo sapiens
ctgggctgcattgggttga

SEQ ID NO: 18841 - DNA, 19 bp, Homo sapiens
tgggctgcattgggttgga

SEQ ID NO: 18842 - DNA, 19 bp, Homo sapiens
gggctgcattgggttggta

SEQ ID NO: 18843 - DNA, 19 bp, Homo sapiens
ggctgcattgggttggtga

SEQ ID NO: 18844 - DNA, 19 bp, Homo sapiens
gctgcattgggttggtgga

SEQ ID NO: 18845 - DNA, 19 bp, Homo sapiens
ctgcattgggttggtggca

SEQ ID NO: 18846 - DNA, 19 bp, Homo sapiens
tgcattgggttggtggcca

SEQ ID NO: 18847 - DNA, 19 bp, Homo sapiens
cattgggttggtggcccaa

SEQ ID NO: 18848 - DNA, 19 bp, Homo sapiens
attgggttggtggcccaca

SEQ ID NO: 18849 - DNA, 19 bp, Homo sapiens
ttgggttggtggcccacga

SEQ ID NO: 18850 - DNA, 19 bp, Homo sapiens
tgggttggtggcccacgca

SEQ ID NO: 18851 - DNA, 19 bp, Homo sapiens
gggttggtggcccacgcca

SEQ ID NO: 18852 - DNA, 19 bp, Homo sapiens
ggttggtggcccacgccga

SEQ ID NO: 18853 - DNA, 19 bp, Homo sapiens
gttggtggcccacgccgga

SEQ ID NO: 18854 - DNA, 19 bp, Homo sapiens
ttggtggcccacgccggca

SEQ ID NO: 18855 - DNA, 19 bp, Homo sapiens
gtggcccacgccggccaaa

SEQ ID NO: 18856 - DNA, 19 bp, Homo sapiens
tggcccacgccggccaaca

SEQ ID NO: 18857 - DNA, 19 bp, Homo sapiens
ggcccacgccggccaacta

SEQ ID NO: 18858 - DNA, 19 bp, Homo sapiens
cccacgccggccaactcaa

SEQ ID NO: 18859 - DNA, 19 bp, Homo sapiens
ccacgccggccaactcaca

SEQ ID NO: 18860 - DNA, 19 bp, Homo sapiens
cacgccggccaactcacca

SEQ ID NO: 18861 - DNA, 19 bp, Homo sapiens
acgccggccaactcaccga

SEQ ID NO: 18862 - DNA, 19 bp, Homo sapiens
gccggccaactcaccgcaa

SEQ ID NO: 18863 - DNA, 19 bp, Homo sapiens
ccggccaactcaccgcaga

SEQ ID NO: 18864 - DNA, 19 bp, Homo sapiens
cggccaactcaccgcagta

SEQ ID NO: 18865 - DNA, 19 bp, Homo sapiens
ggccaactcaccgcagtca

SEQ ID NO: 18866 - DNA, 19 bp, Homo sapiens
gccaactcaccgcagtcta

SEQ ID NO: 18867 - DNA, 19 bp, Homo sapiens
ccaactcaccgcagtctga

SEQ ID NO: 18868 - DNA, 19 bp, Homo sapiens
caactcaccgcagtctgga

SEQ ID NO: 18869 - DNA, 19 bp, Homo sapiens
aactcaccgcagtctggca

SEQ ID NO: 18870 - DNA, 19 bp, Homo sapiens
actcaccgcagtctggcga

SEQ ID NO: 18871 - DNA, 19 bp, Homo sapiens
ctcaccgcagtctggcgca

SEQ ID NO: 18872 - DNA, 19 bp, Homo sapiens
tcaccgcagtctggcgcca

SEQ ID NO: 18873 - DNA, 19 bp, Homo sapiens
caccgcagtctggcgccga

SEQ ID NO: 18874 - DNA, 19 bp, Homo sapiens
accgcagtctggcgccgca

SEQ ID NO: 18875 - DNA, 19 bp, Homo sapiens
ccgcagtctggcgccgcca

SEQ ID NO: 18876 - DNA, 19 bp, Homo sapiens
gcagtctggcgccgcccaa

SEQ ID NO: 18877 - DNA, 19 bp, Homo sapiens
cagtctggcgccgcccaga

SEQ ID NO: 18878 - DNA, 19 bp, Homo sapiens
gtctggcgccgcccaggaa

SEQ ID NO: 18879 - DNA, 19 bp, Homo sapiens
tctggcgccgcccaggaga

SEQ ID NO: 18880 - DNA, 19 bp, Homo sapiens
ctggcgccgcccaggagca

SEQ ID NO: 18881 - DNA, 19 bp, Homo sapiens
tggcgccgcccaggagcca

SEQ ID NO: 18882 - DNA, 19 bp, Homo sapiens
ggcgccgcccaggagccga

SEQ ID NO: 18883 - DNA, 19 bp, Homo sapiens
gcgccgcccaggagccgca

SEQ ID NO: 18884 - DNA, 19 bp, Homo sapiens
cgccgcccaggagccgcca

SEQ ID NO: 18885 - DNA, 19 bp, Homo sapiens
gccgcccaggagccgccca

SEQ ID NO: 18886 - DNA, 19 bp, Homo sapiens
ccgcccaggagccgcccga

SEQ ID NO: 18887 - DNA, 19 bp, Homo sapiens
cgcccaggagccgcccgca

SEQ ID NO: 18888 - DNA, 19 bp, Homo sapiens
gcccaggagccgcccgcga

SEQ ID NO: 18889 - DNA, 19 bp, Homo sapiens
cccaggagccgcccgcgca

SEQ ID NO: 18890 - DNA, 19 bp, Homo sapiens
ccaggagccgcccgcgcta

SEQ ID NO: 18891 - DNA, 19 bp, Homo sapiens
caggagccgcccgcgctca

SEQ ID NO: 18892 - DNA, 19 bp, Homo sapiens
aggagccgcccgcgctcca

SEQ ID NO: 18893 - DNA, 19 bp, Homo sapiens
ggagccgcccgcgctccca

SEQ ID NO: 18894 - DNA, 19 bp, Homo sapiens
gagccgcccgcgctcccta

SEQ ID NO: 18895 - DNA, 19 bp, Homo sapiens
ccgcccgcgctccctgaaa

SEQ ID NO: 18896 - DNA, 19 bp, Homo sapiens
cgcccgcgctccctgaaca

SEQ ID NO: 18897 - DNA, 19 bp, Homo sapiens
gcccgcgctccctgaacca

SEQ ID NO: 18898 - DNA, 19 bp, Homo sapiens
cccgcgctccctgaaccca

SEQ ID NO: 18899 - DNA, 19 bp, Homo sapiens
cgcgctccctgaaccctaa

SEQ ID NO: 18900 - DNA, 19 bp, Homo sapiens
gctccctgaaccctagaaa

SEQ ID NO: 18901 - DNA, 19 bp, Homo sapiens
ctccctgaaccctagaaca

SEQ ID NO: 18902 - DNA, 19 bp, Homo sapiens
tccctgaaccctagaacta

SEQ ID NO: 18903 - DNA, 19 bp, Homo sapiens
ccctgaaccctagaactga

SEQ ID NO: 18904 - DNA, 19 bp, Homo sapiens
cctgaaccctagaactgta

SEQ ID NO: 18905 - DNA, 19 bp, Homo sapiens
ctgaaccctagaactgtca

SEQ ID NO: 18906 - DNA, 19 bp, Homo sapiens
tgaaccctagaactgtcta

SEQ ID NO: 18907 - DNA, 19 bp, Homo sapiens
gaaccctagaactgtctta

SEQ ID NO: 18908 - DNA, 19 bp, Homo sapiens
aaccctagaactgtcttca

SEQ ID NO: 18909 - DNA, 19 bp, Homo sapiens
ccctagaactgtcttcgaa

SEQ ID NO: 18910 - DNA, 19 bp, Homo sapiens
cctagaactgtcttcgaca

SEQ ID NO: 18911 - DNA, 19 bp, Homo sapiens
ctagaactgtcttcgacta

SEQ ID NO: 18912 - DNA, 19 bp, Homo sapiens
tagaactgtcttcgactca

SEQ ID NO: 18913 - DNA, 19 bp, Homo sapiens
agaactgtcttcgactcca

SEQ ID NO: 18914 - DNA, 19 bp, Homo sapiens
gaactgtcttcgactccga

SEQ ID NO: 18915 - DNA, 19 bp, Homo sapiens
aactgtcttcgactccgga

SEQ ID NO: 18916 - DNA, 19 bp, Homo sapiens
actgtcttcgactccggga

SEQ ID NO: 18917 - DNA, 19 bp, Homo sapiens
ctgtcttcgactccgggga

SEQ ID NO: 18918 - DNA, 19 bp, Homo sapiens
tgtcttcgactccggggca

SEQ ID NO: 18919 - DNA, 19 bp, Homo sapiens
gtcttcgactccggggcca

SEQ ID NO: 18920 - DNA, 19 bp, Homo sapiens
tcttcgactccggggccca

SEQ ID NO: 18921 - DNA, 19 bp, Homo sapiens
cttcgactccggggcccca

SEQ ID NO: 18922 - DNA, 19 bp, Homo sapiens
ttcgactccggggccccga

SEQ ID NO: 18923 - DNA, 19 bp, Homo sapiens
tcgactccggggccccgta

SEQ ID NO: 18924 - DNA, 19 bp, Homo sapiens
cgactccggggccccgtta

SEQ ID NO: 18925 - DNA, 19 bp, Homo sapiens
gactccggggccccgttga

SEQ ID NO: 18926 - DNA, 19 bp, Homo sapiens
tccggggccccgttggaaa

SEQ ID NO: 18927 - DNA, 19 bp, Homo sapiens
cggggccccgttggaagaa

SEQ ID NO: 18928 - DNA, 19 bp, Homo sapiens
ggggccccgttggaagaca

SEQ ID NO: 18929 - DNA, 19 bp, Homo sapiens
gggccccgttggaagacta

SEQ ID NO: 18930 - DNA, 19 bp, Homo sapiens
gccccgttggaagactgaa

SEQ ID NO: 18931 - DNA, 19 bp, Homo sapiens
ccccgttggaagactgaga

SEQ ID NO: 18932 - DNA, 19 bp, Homo sapiens
cccgttggaagactgagta

SEQ ID NO: 18933 - DNA, 19 bp, Homo sapiens
ccgttggaagactgagtga

SEQ ID NO: 18934 - DNA, 19 bp, Homo sapiens
cgttggaagactgagtgca

SEQ ID NO: 18935 - DNA, 19 bp, Homo sapiens
gttggaagactgagtgcca

SEQ ID NO: 18936 - DNA, 19 bp, Homo sapiens
ttggaagactgagtgccca

SEQ ID NO: 18937 - DNA, 19 bp, Homo sapiens
tggaagactgagtgcccga

SEQ ID NO: 18938 - DNA, 19 bp, Homo sapiens
ggaagactgagtgcccgga

SEQ ID NO: 18939 - DNA, 19 bp, Homo sapiens
gaagactgagtgcccggga

SEQ ID NO: 18940 - DNA, 19 bp, Homo sapiens
aagactgagtgcccgggga

SEQ ID NO: 18941 - DNA, 19 bp, Homo sapiens
gactgagtgcccggggcaa

SEQ ID NO: 18942 - DNA, 19 bp, Homo sapiens
actgagtgcccggggcaca

SEQ ID NO: 18943 - DNA, 19 bp, Homo sapiens
ctgagtgcccggggcacga

SEQ ID NO: 18944 - DNA, 19 bp, Homo sapiens
tgagtgcccggggcacgga

SEQ ID NO: 18945 - DNA, 19 bp, Homo sapiens
agtgcccggggcacggcaa

SEQ ID NO: 18946 - DNA, 19 bp, Homo sapiens
tgcccggggcacggcacaa

SEQ ID NO: 18947 - DNA, 19 bp, Homo sapiens
ccggggcacggcacagaaa

SEQ ID NO: 18948 - DNA, 19 bp, Homo sapiens
cggggcacggcacagaaga

SEQ ID NO: 18949 - DNA, 19 bp, Homo sapiens
ggggcacggcacagaagca

SEQ ID NO: 18950 - DNA, 19 bp, Homo sapiens
gggcacggcacagaagcca

SEQ ID NO: 18951 - DNA, 19 bp, Homo sapiens
ggcacggcacagaagccga

SEQ ID NO: 18952 - DNA, 19 bp, Homo sapiens
gcacggcacagaagccgca

SEQ ID NO: 18953 - DNA, 19 bp, Homo sapiens
cacggcacagaagccgcga

SEQ ID NO: 18954 - DNA, 19 bp, Homo sapiens
acggcacagaagccgcgca

SEQ ID NO: 18955 - DNA, 19 bp, Homo sapiens
cggcacagaagccgcgcca

SEQ ID NO: 18956 - DNA, 19 bp, Homo sapiens
gcacagaagccgcgcccaa

SEQ ID NO: 18957 - DNA, 19 bp, Homo sapiens
cacagaagccgcgcccaca

SEQ ID NO: 18958 - DNA, 19 bp, Homo sapiens
acagaagccgcgcccacca

SEQ ID NO: 18959 - DNA, 19 bp, Homo sapiens
cagaagccgcgcccaccga

SEQ ID NO: 18960 - DNA, 19 bp, Homo sapiens
agaagccgcgcccaccgca

SEQ ID NO: 18961 - DNA, 19 bp, Homo sapiens
gaagccgcgcccaccgcca

SEQ ID NO: 18962 - DNA, 19 bp, Homo sapiens
aagccgcgcccaccgccta

SEQ ID NO: 18963 - DNA, 19 bp, Homo sapiens
agccgcgcccaccgcctga

SEQ ID NO: 18964 - DNA, 19 bp, Homo sapiens
gccgcgcccaccgcctgca

SEQ ID NO: 18965 - DNA, 19 bp, Homo sapiens
cgcgcccaccgcctgccaa

SEQ ID NO: 18966 - DNA, 19 bp, Homo sapiens
gcgcccaccgcctgccaga

SEQ ID NO: 18967 - DNA, 19 bp, Homo sapiens
cgcccaccgcctgccagta

SEQ ID NO: 18968 - DNA, 19 bp, Homo sapiens
gcccaccgcctgccagtta

SEQ ID NO: 18969 - DNA, 19 bp, Homo sapiens
ccaccgcctgccagttcaa

SEQ ID NO: 18970 - DNA, 19 bp, Homo sapiens
ccgcctgccagttcacaaa

SEQ ID NO: 18971 - DNA, 19 bp, Homo sapiens
cgcctgccagttcacaaca

SEQ ID NO: 18972 - DNA, 19 bp, Homo sapiens
gcctgccagttcacaacca

SEQ ID NO: 18973 - DNA, 19 bp, Homo sapiens
cctgccagttcacaaccga

SEQ ID NO: 18974 - DNA, 19 bp, Homo sapiens
ctgccagttcacaaccgca

SEQ ID NO: 18975 - DNA, 19 bp, Homo sapiens
tgccagttcacaaccgcta

SEQ ID NO: 18976 - DNA, 19 bp, Homo sapiens
gccagttcacaaccgctca

SEQ ID NO: 18977 - DNA, 19 bp, Homo sapiens
ccagttcacaaccgctcca

SEQ ID NO: 18978 - DNA, 19 bp, Homo sapiens
agttcacaaccgctccgaa

SEQ ID NO: 18979 - DNA, 19 bp, Homo sapiens
gttcacaaccgctccgaga

SEQ ID NO: 18980 - DNA, 19 bp, Homo sapiens
ttcacaaccgctccgagca

SEQ ID NO: 18981 - DNA, 19 bp, Homo sapiens
tcacaaccgctccgagcga

SEQ ID NO: 18982 - DNA, 19 bp, Homo sapiens
cacaaccgctccgagcgta

SEQ ID NO: 18983 - DNA, 19 bp, Homo sapiens
acaaccgctccgagcgtga

SEQ ID NO: 18984 - DNA, 19 bp, Homo sapiens
caaccgctccgagcgtgga

SEQ ID NO: 18985 - DNA, 19 bp, Homo sapiens
aaccgctccgagcgtggga

SEQ ID NO: 18986 - DNA, 19 bp, Homo sapiens
accgctccgagcgtgggta

SEQ ID NO: 18987 - DNA, 19 bp, Homo sapiens
ccgctccgagcgtgggtca

SEQ ID NO: 18988 - DNA, 19 bp, Homo sapiens
cgctccgagcgtgggtcta

SEQ ID NO: 18989 - DNA, 19 bp, Homo sapiens
gctccgagcgtgggtctca

SEQ ID NO: 18990 - DNA, 19 bp, Homo sapiens
ctccgagcgtgggtctcca

SEQ ID NO: 18991 - DNA, 19 bp, Homo sapiens
tccgagcgtgggtctccga

SEQ ID NO: 18992 - DNA, 19 bp, Homo sapiens
ccgagcgtgggtctccgca

SEQ ID NO: 18993 - DNA, 19 bp, Homo sapiens
cgagcgtgggtctccgcca

SEQ ID NO: 18994 - DNA, 19 bp, Homo sapiens
agcgtgggtctccgcccaa

SEQ ID NO: 18995 - DNA, 19 bp, Homo sapiens
gcgtgggtctccgcccaga

SEQ ID NO: 18996 - DNA, 19 bp, Homo sapiens
cgtgggtctccgcccagca

SEQ ID NO: 18997 - DNA, 19 bp, Homo sapiens
gtgggtctccgcccagcta

SEQ ID NO: 18998 - DNA, 19 bp, Homo sapiens
tgggtctccgcccagctca

SEQ ID NO: 18999 - DNA, 19 bp, Homo sapiens
ggtctccgcccagctccaa

SEQ ID NO: 19000 - DNA, 19 bp, Homo sapiens
gtctccgcccagctccaga

SEQ ID NO: 19001 - DNA, 19 bp, Homo sapiens
tctccgcccagctccagta

SEQ ID NO: 19002 - DNA, 19 bp, Homo sapiens
ctccgcccagctccagtca

SEQ ID NO: 19003 - DNA, 19 bp, Homo sapiens
tccgcccagctccagtcca

SEQ ID NO: 19004 - DNA, 19 bp, Homo sapiens
ccgcccagctccagtccta

SEQ ID NO: 19005 - DNA, 19 bp, Homo sapiens
cgcccagctccagtcctga

SEQ ID NO: 19006 - DNA, 19 bp, Homo sapiens
gcccagctccagtcctgta

SEQ ID NO: 19007 - DNA, 19 bp, Homo sapiens
ccagctccagtcctgtgaa

SEQ ID NO: 19008 - DNA, 19 bp, Homo sapiens
cagctccagtcctgtgata

SEQ ID NO: 19009 - DNA, 19 bp, Homo sapiens
agctccagtcctgtgatca

SEQ ID NO: 19010 - DNA, 19 bp, Homo sapiens
gctccagtcctgtgatcca

SEQ ID NO: 19011 - DNA, 19 bp, Homo sapiens
ctccagtcctgtgatccga

SEQ ID NO: 19012 - DNA, 19 bp, Homo sapiens
tccagtcctgtgatccgga

SEQ ID NO: 19013 - DNA, 19 bp, Homo sapiens
ccagtcctgtgatccggga

SEQ ID NO: 19014 - DNA, 19 bp, Homo sapiens
cagtcctgtgatccgggca

SEQ ID NO: 19015 - DNA, 19 bp, Homo sapiens
agtcctgtgatccgggcca

SEQ ID NO: 19016 - DNA, 19 bp, Homo sapiens
gtcctgtgatccgggccca

SEQ ID NO: 19017 - DNA, 19 bp, Homo sapiens
tcctgtgatccgggcccga

SEQ ID NO: 19018 - DNA, 19 bp, Homo sapiens
cctgtgatccgggcccgca

SEQ ID NO: 19019 - DNA, 19 bp, Homo sapiens
ctgtgatccgggcccgcca

SEQ ID NO: 19020 - DNA, 19 bp, Homo sapiens
tgtgatccgggcccgccca

SEQ ID NO: 19021 - DNA, 19 bp, Homo sapiens
gtgatccgggcccgcccca

SEQ ID NO: 19022 - DNA, 19 bp, Homo sapiens
tgatccgggcccgccccca

SEQ ID NO: 19023 - DNA, 19 bp, Homo sapiens
atccgggcccgccccctaa

SEQ ID NO: 19024 - DNA, 19 bp, Homo sapiens
tccgggcccgccccctaga

SEQ ID NO: 19025 - DNA, 19 bp, Homo sapiens
ccgggcccgccccctagca

SEQ ID NO: 19026 - DNA, 19 bp, Homo sapiens
cgggcccgccccctagcga

SEQ ID NO: 19027 - DNA, 19 bp, Homo sapiens
gggcccgccccctagcgga

SEQ ID NO: 19028 - DNA, 19 bp, Homo sapiens
ggcccgccccctagcggca

SEQ ID NO: 19029 - DNA, 19 bp, Homo sapiens
gcccgccccctagcggcca

SEQ ID NO: 19030 - DNA, 19 bp, Homo sapiens
cccgccccctagcggccga

SEQ ID NO: 19031 - DNA, 19 bp, Homo sapiens
ccgccccctagcggccgga

SEQ ID NO: 19032 - DNA, 19 bp, Homo sapiens
cgccccctagcggccggga

SEQ ID NO: 19033 - DNA, 19 bp, Homo sapiens
ccccctagcggccggggaa

SEQ ID NO: 19034 - DNA, 19 bp, Homo sapiens
cccctagcggccggggaga

SEQ ID NO: 19035 - DNA, 19 bp, Homo sapiens
ccctagcggccggggagga

SEQ ID NO: 19036 - DNA, 19 bp, Homo sapiens
ctagcggccggggagggaa

SEQ ID NO: 19037 - DNA, 19 bp, Homo sapiens
tagcggccggggagggaga

SEQ ID NO: 19038 - DNA, 19 bp, Homo sapiens
agcggccggggagggagga

SEQ ID NO: 19039 - DNA, 19 bp, Homo sapiens
gcggccggggagggaggga

SEQ ID NO: 19040 - DNA, 19 bp, Homo sapiens
cggccggggagggagggga

SEQ ID NO: 19041 - DNA, 19 bp, Homo sapiens
ggccggggagggaggggca

SEQ ID NO: 19042 - DNA, 19 bp, Homo sapiens
gccggggagggaggggcca

SEQ ID NO: 19043 - DNA, 19 bp, Homo sapiens
ccggggagggaggggccga

SEQ ID NO: 19044 - DNA, 19 bp, Homo sapiens
cggggagggaggggccgga

SEQ ID NO: 19045 - DNA, 19 bp, Homo sapiens
ggggagggaggggccggga

SEQ ID NO: 19046 - DNA, 19 bp, Homo sapiens
gggagggaggggccgggta

SEQ ID NO: 19047 - DNA, 19 bp, Homo sapiens
ggagggaggggccgggtca

SEQ ID NO: 19048 - DNA, 19 bp, Homo sapiens
gagggaggggccgggtcca

SEQ ID NO: 19049 - DNA, 19 bp, Homo sapiens
agggaggggccgggtccga

SEQ ID NO: 19050 - DNA, 19 bp, Homo sapiens
gggaggggccgggtccgca

SEQ ID NO: 19051 - DNA, 19 bp, Homo sapiens
ggaggggccgggtccgcga

SEQ ID NO: 19052 - DNA, 19 bp, Homo sapiens
gaggggccgggtccgcgga

SEQ ID NO: 19053 - DNA, 19 bp, Homo sapiens
aggggccgggtccgcggca

SEQ ID NO: 19054 - DNA, 19 bp, Homo sapiens
ggggccgggtccgcggcca

SEQ ID NO: 19055 - DNA, 19 bp, Homo sapiens
gggccgggtccgcggccga

SEQ ID NO: 19056 - DNA, 19 bp, Homo sapiens
ggccgggtccgcggccgga

SEQ ID NO: 19057 - DNA, 19 bp, Homo sapiens
gccgggtccgcggccggca

SEQ ID NO: 19058 - DNA, 19 bp, Homo sapiens
gggtccgcggccggcgaaa

SEQ ID NO: 19059 - DNA, 19 bp, Homo sapiens
ggtccgcggccggcgaaca

SEQ ID NO: 19060 - DNA, 19 bp, Homo sapiens
gtccgcggccggcgaacga

SEQ ID NO: 19061 - DNA, 19 bp, Homo sapiens
tccgcggccggcgaacgga

SEQ ID NO: 19062 - DNA, 19 bp, Homo sapiens
ccgcggccggcgaacggga

SEQ ID NO: 19063 - DNA, 19 bp, Homo sapiens
cgcggccggcgaacgggga

SEQ ID NO: 19064 - DNA, 19 bp, Homo sapiens
gcggccggcgaacggggca

SEQ ID NO: 19065 - DNA, 19 bp, Homo sapiens
cggccggcgaacggggcta

SEQ ID NO: 19066 - DNA, 19 bp, Homo sapiens
ggccggcgaacggggctca

SEQ ID NO: 19067 - DNA, 19 bp, Homo sapiens
cggcgaacggggctcgaaa

SEQ ID NO: 19068 - DNA, 19 bp, Homo sapiens
ggcgaacggggctcgaaga

SEQ ID NO: 19069 - DNA, 19 bp, Homo sapiens
gcgaacggggctcgaagga

SEQ ID NO: 19070 - DNA, 19 bp, Homo sapiens
cgaacggggctcgaaggga

SEQ ID NO: 19071 - DNA, 19 bp, Homo sapiens
gaacggggctcgaagggta

SEQ ID NO: 19072 - DNA, 19 bp, Homo sapiens
aacggggctcgaagggtca

SEQ ID NO: 19073 - DNA, 19 bp, Homo sapiens
acggggctcgaagggtcca

SEQ ID NO: 19074 - DNA, 19 bp, Homo sapiens
cggggctcgaagggtccta

SEQ ID NO: 19075 - DNA, 19 bp, Homo sapiens
ggggctcgaagggtcctta

SEQ ID NO: 19076 - DNA, 19 bp, Homo sapiens
gggctcgaagggtccttga

SEQ ID NO: 19077 - DNA, 19 bp, Homo sapiens
gctcgaagggtccttgtaa

SEQ ID NO: 19078 - DNA, 19 bp, Homo sapiens
ctcgaagggtccttgtaga

SEQ ID NO: 19079 - DNA, 19 bp, Homo sapiens
tcgaagggtccttgtagca

SEQ ID NO: 19080 - DNA, 19 bp, Homo sapiens
cgaagggtccttgtagcca

SEQ ID NO: 19081 - DNA, 19 bp, Homo sapiens
gaagggtccttgtagccga

SEQ ID NO: 19082 - DNA, 19 bp, Homo sapiens
aagggtccttgtagccgga

SEQ ID NO: 19083 - DNA, 19 bp, Homo sapiens
ggtccttgtagccgggaaa

SEQ ID NO: 19084 - DNA, 19 bp, Homo sapiens
gtccttgtagccgggaata

SEQ ID NO: 19085 - DNA, 19 bp, Homo sapiens
tccttgtagccgggaatga

SEQ ID NO: 19086 - DNA, 19 bp, Homo sapiens
ccttgtagccgggaatgca

SEQ ID NO: 19087 - DNA, 19 bp, Homo sapiens
cttgtagccgggaatgcta

SEQ ID NO: 19088 - DNA, 19 bp, Homo sapiens
ttgtagccgggaatgctga

SEQ ID NO: 19089 - DNA, 19 bp, Homo sapiens
tgtagccgggaatgctgca

SEQ ID NO: 19090 - DNA, 19 bp, Homo sapiens
gtagccgggaatgctgcta

SEQ ID NO: 19091 - DNA, 19 bp, Homo sapiens
tagccgggaatgctgctga

SEQ ID NO: 19092 - DNA, 19 bp, Homo sapiens
agccgggaatgctgctgca

SEQ ID NO: 19093 - DNA, 19 bp, Homo sapiens
gccgggaatgctgctgcta

SEQ ID NO: 19094 - DNA, 19 bp, Homo sapiens
ccgggaatgctgctgctga

SEQ ID NO: 19095 - DNA, 19 bp, Homo sapiens
cgggaatgctgctgctgca

SEQ ID NO: 19096 - DNA, 19 bp, Homo sapiens
gggaatgctgctgctgcta

SEQ ID NO: 19097 - DNA, 19 bp, Homo sapiens
ggaatgctgctgctgctga

SEQ ID NO: 19098 - DNA, 19 bp, Homo sapiens
gaatgctgctgctgctgca

SEQ ID NO: 19099 - DNA, 19 bp, Homo sapiens
aatgctgctgctgctgcta

SEQ ID NO: 19100 - DNA, 19 bp, Homo sapiens
atgctgctgctgctgctga

SEQ ID NO: 19101 - DNA, 19 bp, Homo sapiens
ctgctgctgctgctgctga

SEQ ID NO: 19102 - DNA, 19 bp, Homo sapiens
tgctgctgctgctgctgga

SEQ ID NO: 19103 - DNA, 19 bp, Homo sapiens
gctgctgctgctgctggga

SEQ ID NO: 19104 - DNA, 19 bp, Homo sapiens
ctgctgctgctgctgggga

SEQ ID NO: 19105 - DNA, 19 bp, Homo sapiens
tgctgctgctgctggggga

SEQ ID NO: 19106 - DNA, 19 bp, Homo sapiens
ctgctgctgctggggggaa

SEQ ID NO: 19107 - DNA, 19 bp, Homo sapiens
tgctgctgctggggggata

SEQ ID NO: 19108 - DNA, 19 bp, Homo sapiens
ctgctgctggggggatcaa

SEQ ID NO: 19109 - DNA, 19 bp, Homo sapiens
gctgctggggggatcacaa

SEQ ID NO: 19110 - DNA, 19 bp, Homo sapiens
tgctggggggatcacagaa

SEQ ID NO: 19111 - DNA, 19 bp, Homo sapiens
gctggggggatcacagaca

SEQ ID NO: 19112 - DNA, 19 bp, Homo sapiens
tggggggatcacagaccaa

SEQ ID NO: 19113 - DNA, 19 bp, Homo sapiens
ggggggatcacagaccata

SEQ ID NO: 19114 - DNA, 19 bp, Homo sapiens
gggggatcacagaccatta

SEQ ID NO: 19115 - DNA, 19 bp, Homo sapiens
ggggatcacagaccattta

SEQ ID NO: 19116 - DNA, 19 bp, Homo sapiens
gggatcacagaccatttca

SEQ ID NO: 19117 - DNA, 19 bp, Homo sapiens
ggatcacagaccatttcta

SEQ ID NO: 19118 - DNA, 19 bp, Homo sapiens
gatcacagaccatttctta

SEQ ID NO: 19119 - DNA, 19 bp, Homo sapiens
atcacagaccatttcttta

SEQ ID NO: 19120 - DNA, 19 bp, Homo sapiens
tcacagaccatttctttca

SEQ ID NO: 19121 - DNA, 19 bp, Homo sapiens
cacagaccatttctttcta

SEQ ID NO: 19122 - DNA, 19 bp, Homo sapiens
acagaccatttctttctta

SEQ ID NO: 19123 - DNA, 19 bp, Homo sapiens
cagaccatttctttcttta

SEQ ID NO: 19124 - DNA, 19 bp, Homo sapiens
agaccatttctttctttca

SEQ ID NO: 19125 - DNA, 19 bp, Homo sapiens
gaccatttctttctttcga

SEQ ID NO: 19126 - DNA, 19 bp, Homo sapiens
accatttctttctttcgga

SEQ ID NO: 19127 - DNA, 19 bp, Homo sapiens
ccatttctttctttcggca

SEQ ID NO: 19128 - DNA, 19 bp, Homo sapiens
atttctttctttcggccaa

SEQ ID NO: 19129 - DNA, 19 bp, Homo sapiens
tttctttctttcggccaga

SEQ ID NO: 19130 - DNA, 19 bp, Homo sapiens
ttctttctttcggccagga

SEQ ID NO: 19131 - DNA, 19 bp, Homo sapiens
tctttctttcggccaggca

SEQ ID NO: 19132 - DNA, 19 bp, Homo sapiens
ctttctttcggccaggcta

SEQ ID NO: 19133 - DNA, 19 bp, Homo sapiens
ttctttcggccaggctgaa

SEQ ID NO: 19134 - DNA, 19 bp, Homo sapiens
tctttcggccaggctgaga

SEQ ID NO: 19135 - DNA, 19 bp, Homo sapiens
ctttcggccaggctgagga

SEQ ID NO: 19136 - DNA, 19 bp, Homo sapiens
tttcggccaggctgaggca

SEQ ID NO: 19137 - DNA, 19 bp, Homo sapiens
ttcggccaggctgaggcca

SEQ ID NO: 19138 - DNA, 19 bp, Homo sapiens
tcggccaggctgaggccca

SEQ ID NO: 19139 - DNA, 19 bp, Homo sapiens
cggccaggctgaggcccta

SEQ ID NO: 19140 - DNA, 19 bp, Homo sapiens
gccaggctgaggccctgaa

SEQ ID NO: 19141 - DNA, 19 bp, Homo sapiens
ccaggctgaggccctgaca

SEQ ID NO: 19142 - DNA, 19 bp, Homo sapiens
caggctgaggccctgacga

SEQ ID NO: 19143 - DNA, 19 bp, Homo sapiens
aggctgaggccctgacgta

SEQ ID NO: 19144 - DNA, 19 bp, Homo sapiens
ggctgaggccctgacgtga

SEQ ID NO: 19145 - DNA, 19 bp, Homo sapiens
ctgaggccctgacgtggaa

SEQ ID NO: 19146 - DNA, 19 bp, Homo sapiens
tgaggccctgacgtggata

SEQ ID NO: 19147 - DNA, 19 bp, Homo sapiens
gaggccctgacgtggatga

SEQ ID NO: 19148 - DNA, 19 bp, Homo sapiens
aggccctgacgtggatgga

SEQ ID NO: 19149 - DNA, 19 bp, Homo sapiens
ggccctgacgtggatggga

SEQ ID NO: 19150 - DNA, 19 bp, Homo sapiens
ctgacgtggatgggcaaaa

SEQ ID NO: 19151 - DNA, 19 bp, Homo sapiens
tgacgtggatgggcaaaca

SEQ ID NO: 19152 - DNA, 19 bp, Homo sapiens
gacgtggatgggcaaacta

SEQ ID NO: 19153 - DNA, 19 bp, Homo sapiens
acgtggatgggcaaactga

SEQ ID NO: 19154 - DNA, 19 bp, Homo sapiens
gtggatgggcaaactgcaa

SEQ ID NO: 19155 - DNA, 19 bp, Homo sapiens
tggatgggcaaactgcaga

SEQ ID NO: 19156 - DNA, 19 bp, Homo sapiens
ggatgggcaaactgcagga

SEQ ID NO: 19157 - DNA, 19 bp, Homo sapiens
gatgggcaaactgcaggca

SEQ ID NO: 19158 - DNA, 19 bp, Homo sapiens
atgggcaaactgcaggcca

SEQ ID NO: 19159 - DNA, 19 bp, Homo sapiens
tgggcaaactgcaggccta

SEQ ID NO: 19160 - DNA, 19 bp, Homo sapiens
gggcaaactgcaggcctga

SEQ ID NO: 19161 - DNA, 19 bp, Homo sapiens
ggcaaactgcaggcctgga

SEQ ID NO: 19162 - DNA, 19 bp, Homo sapiens
aaactgcaggcctgggaaa

SEQ ID NO: 19163 - DNA, 19 bp, Homo sapiens
aactgcaggcctgggaaga

SEQ ID NO: 19164 - DNA, 19 bp, Homo sapiens
actgcaggcctgggaagga

SEQ ID NO: 19165 - DNA, 19 bp, Homo sapiens
tgcaggcctgggaaggcaa

SEQ ID NO: 19166 - DNA, 19 bp, Homo sapiens
gcaggcctgggaaggcaga

SEQ ID NO: 19167 - DNA, 19 bp, Homo sapiens
ggcctgggaaggcagcaaa

SEQ ID NO: 19168 - DNA, 19 bp, Homo sapiens
gcctgggaaggcagcaaga

SEQ ID NO: 19169 - DNA, 19 bp, Homo sapiens
cctgggaaggcagcaagca

SEQ ID NO: 19170 - DNA, 19 bp, Homo sapiens
ctgggaaggcagcaagcca

SEQ ID NO: 19171 - DNA, 19 bp, Homo sapiens
tgggaaggcagcaagccga

SEQ ID NO: 19172 - DNA, 19 bp, Homo sapiens
gggaaggcagcaagccgga

SEQ ID NO: 19173 - DNA, 19 bp, Homo sapiens
ggaaggcagcaagccggga

SEQ ID NO: 19174 - DNA, 19 bp, Homo sapiens
gaaggcagcaagccgggca

SEQ ID NO: 19175 - DNA, 19 bp, Homo sapiens
aaggcagcaagccgggcca

SEQ ID NO: 19176 - DNA, 19 bp, Homo sapiens
aggcagcaagccgggccga

SEQ ID NO: 19177 - DNA, 19 bp, Homo sapiens
ggcagcaagccgggccgta

SEQ ID NO: 19178 - DNA, 19 bp, Homo sapiens
gcagcaagccgggccgtca

SEQ ID NO: 19179 - DNA, 19 bp, Homo sapiens
cagcaagccgggccgtcca

SEQ ID NO: 19180 - DNA, 19 bp, Homo sapiens
agcaagccgggccgtccga

SEQ ID NO: 19181 - DNA, 19 bp, Homo sapiens
gcaagccgggccgtccgta

SEQ ID NO: 19182 - DNA, 19 bp, Homo sapiens
caagccgggccgtccgtga

SEQ ID NO: 19183 - DNA, 19 bp, Homo sapiens
aagccgggccgtccgtgta

SEQ ID NO: 19184 - DNA, 19 bp, Homo sapiens
agccgggccgtccgtgtta

SEQ ID NO: 19185 - DNA, 19 bp, Homo sapiens
gccgggccgtccgtgttca

SEQ ID NO: 19186 - DNA, 19 bp, Homo sapiens
cgggccgtccgtgttccaa

SEQ ID NO: 19187 - DNA, 19 bp, Homo sapiens
gggccgtccgtgttccata

SEQ ID NO: 19188 - DNA, 19 bp, Homo sapiens
ggccgtccgtgttccatca

SEQ ID NO: 19189 - DNA, 19 bp, Homo sapiens
gccgtccgtgttccatcca

SEQ ID NO: 19190 - DNA, 19 bp, Homo sapiens
ccgtccgtgttccatccta

SEQ ID NO: 19191 - DNA, 19 bp, Homo sapiens
cgtccgtgttccatcctca

SEQ ID NO: 19192 - DNA, 19 bp, Homo sapiens
tccgtgttccatcctccaa

SEQ ID NO: 19193 - DNA, 19 bp, Homo sapiens
ccgtgttccatcctccaca

SEQ ID NO: 19194 - DNA, 19 bp, Homo sapiens
cgtgttccatcctccacga

SEQ ID NO: 19195 - DNA, 19 bp, Homo sapiens
tgttccatcctccacgcaa

SEQ ID NO: 19196 - DNA, 19 bp, Homo sapiens
gttccatcctccacgcaca

SEQ ID NO: 19197 - DNA, 19 bp, Homo sapiens
ttccatcctccacgcacca

SEQ ID NO: 19198 - DNA, 19 bp, Homo sapiens
tccatcctccacgcaccca

SEQ ID NO: 19199 - DNA, 19 bp, Homo sapiens
ccatcctccacgcacccca

SEQ ID NO: 19200 - DNA, 19 bp, Homo sapiens
atcctccacgcacccccaa

SEQ ID NO: 19201 - DNA, 19 bp, Homo sapiens
tcctccacgcacccccaca

SEQ ID NO: 19202 - DNA, 19 bp, Homo sapiens
cctccacgcacccccacca

SEQ ID NO: 19203 - DNA, 19 bp, Homo sapiens
tccacgcacccccacctaa

SEQ ID NO: 19204 - DNA, 19 bp, Homo sapiens
ccacgcacccccacctata

SEQ ID NO: 19205 - DNA, 19 bp, Homo sapiens
cacgcacccccacctatca

SEQ ID NO: 19206 - DNA, 19 bp, Homo sapiens
acgcacccccacctatcga

SEQ ID NO: 19207 - DNA, 19 bp, Homo sapiens
cgcacccccacctatcgta

SEQ ID NO: 19208 - DNA, 19 bp, Homo sapiens
gcacccccacctatcgtta

SEQ ID NO: 19209 - DNA, 19 bp, Homo sapiens
cacccccacctatcgttga

SEQ ID NO: 19210 - DNA, 19 bp, Homo sapiens
acccccacctatcgttgga

SEQ ID NO: 19211 - DNA, 19 bp, Homo sapiens
cccccacctatcgttggta

SEQ ID NO: 19212 - DNA, 19 bp, Homo sapiens
ccccacctatcgttggtta

SEQ ID NO: 19213 - DNA, 19 bp, Homo sapiens
cccacctatcgttggttca

SEQ ID NO: 19214 - DNA, 19 bp, Homo sapiens
ccacctatcgttggttcga

SEQ ID NO: 19215 - DNA, 19 bp, Homo sapiens
ctatcgttggttcgcaaaa

SEQ ID NO: 19216 - DNA, 19 bp, Homo sapiens
tatcgttggttcgcaaaga

SEQ ID NO: 19217 - DNA, 19 bp, Homo sapiens
atcgttggttcgcaaagta

SEQ ID NO: 19218 - DNA, 19 bp, Homo sapiens
tcgttggttcgcaaagtga

SEQ ID NO: 19219 - DNA, 19 bp, Homo sapiens
tggttcgcaaagtgcaaaa

SEQ ID NO: 19220 - DNA, 19 bp, Homo sapiens
ggttcgcaaagtgcaaaga

SEQ ID NO: 19221 - DNA, 19 bp, Homo sapiens
gttcgcaaagtgcaaagca

SEQ ID NO: 19222 - DNA, 19 bp, Homo sapiens
ttcgcaaagtgcaaagcta

SEQ ID NO: 19223 - DNA, 19 bp, Homo sapiens
tcgcaaagtgcaaagctta

SEQ ID NO: 19224 - DNA, 19 bp, Homo sapiens
cgcaaagtgcaaagcttta

SEQ ID NO: 19225 - DNA, 19 bp, Homo sapiens
gcaaagtgcaaagctttca

SEQ ID NO: 19226 - DNA, 19 bp, Homo sapiens
caaagtgcaaagctttcta

SEQ ID NO: 19227 - DNA, 19 bp, Homo sapiens
aaagtgcaaagctttctta

SEQ ID NO: 19228 - DNA, 19 bp, Homo sapiens
aagtgcaaagctttcttga

SEQ ID NO: 19229 - DNA, 19 bp, Homo sapiens
agtgcaaagctttcttgta

SEQ ID NO: 19230 - DNA, 19 bp, Homo sapiens
gtgcaaagctttcttgtga

SEQ ID NO: 19231 - DNA, 19 bp, Homo sapiens
gcaaagctttcttgtgcaa

SEQ ID NO: 19232 - DNA, 19 bp, Homo sapiens
caaagctttcttgtgcata

SEQ ID NO: 19233 - DNA, 19 bp, Homo sapiens
aagctttcttgtgcatgaa

SEQ ID NO: 19234 - DNA, 19 bp, Homo sapiens
agctttcttgtgcatgaca

SEQ ID NO: 19235 - DNA, 19 bp, Homo sapiens
gctttcttgtgcatgacga

SEQ ID NO: 19236 - DNA, 19 bp, Homo sapiens
ctttcttgtgcatgacgca

SEQ ID NO: 19237 - DNA, 19 bp, Homo sapiens
tttcttgtgcatgacgcca

SEQ ID NO: 19238 - DNA, 19 bp, Homo sapiens
ttcttgtgcatgacgccca

SEQ ID NO: 19239 - DNA, 19 bp, Homo sapiens
tcttgtgcatgacgcccta

SEQ ID NO: 19240 - DNA, 19 bp, Homo sapiens
cttgtgcatgacgccctga

SEQ ID NO: 19241 - DNA, 19 bp, Homo sapiens
ttgtgcatgacgccctgca

SEQ ID NO: 19242 - DNA, 19 bp, Homo sapiens
tgtgcatgacgccctgcta

SEQ ID NO: 19243 - DNA, 19 bp, Homo sapiens
gtgcatgacgccctgctca

SEQ ID NO: 19244 - DNA, 19 bp, Homo sapiens
tgcatgacgccctgctcta

SEQ ID NO: 19245 - DNA, 19 bp, Homo sapiens
gcatgacgccctgctctga

SEQ ID NO: 19246 - DNA, 19 bp, Homo sapiens
catgacgccctgctctgga

SEQ ID NO: 19247 - DNA, 19 bp, Homo sapiens
atgacgccctgctctggga

SEQ ID NO: 19248 - DNA, 19 bp, Homo sapiens
gacgccctgctctggggaa

SEQ ID NO: 19249 - DNA, 19 bp, Homo sapiens
acgccctgctctggggaga

SEQ ID NO: 19250 - DNA, 19 bp, Homo sapiens
cgccctgctctggggagca

SEQ ID NO: 19251 - DNA, 19 bp, Homo sapiens
gccctgctctggggagcga

SEQ ID NO: 19252 - DNA, 19 bp, Homo sapiens
ccctgctctggggagcgta

SEQ ID NO: 19253 - DNA, 19 bp, Homo sapiens
cctgctctggggagcgtca

SEQ ID NO: 19254 - DNA, 19 bp, Homo sapiens
ctgctctggggagcgtcta

SEQ ID NO: 19255 - DNA, 19 bp, Homo sapiens
tgctctggggagcgtctga

SEQ ID NO: 19256 - DNA, 19 bp, Homo sapiens
gctctggggagcgtctgga

SEQ ID NO: 19257 - DNA, 19 bp, Homo sapiens
ctctggggagcgtctggca

SEQ ID NO: 19258 - DNA, 19 bp, Homo sapiens
tctggggagcgtctggcga

SEQ ID NO: 19259 - DNA, 19 bp, Homo sapiens
ctggggagcgtctggcgca

SEQ ID NO: 19260 - DNA, 19 bp, Homo sapiens
ggggagcgtctggcgcgaa

SEQ ID NO: 19261 - DNA, 19 bp, Homo sapiens
gggagcgtctggcgcgata

SEQ ID NO: 19262 - DNA, 19 bp, Homo sapiens
ggagcgtctggcgcgatca

SEQ ID NO: 19263 - DNA, 19 bp, Homo sapiens
gagcgtctggcgcgatcta

SEQ ID NO: 19264 - DNA, 19 bp, Homo sapiens
agcgtctggcgcgatctca

SEQ ID NO: 19265 - DNA, 19 bp, Homo sapiens
gcgtctggcgcgatctcta

SEQ ID NO: 19266 - DNA, 19 bp, Homo sapiens
cgtctggcgcgatctctga

SEQ ID NO: 19267 - DNA, 19 bp, Homo sapiens
gtctggcgcgatctctgca

SEQ ID NO: 19268 - DNA, 19 bp, Homo sapiens
tctggcgcgatctctgcca

SEQ ID NO: 19269 - DNA, 19 bp, Homo sapiens
ctggcgcgatctctgccta

SEQ ID NO: 19270 - DNA, 19 bp, Homo sapiens
tggcgcgatctctgcctga

SEQ ID NO: 19271 - DNA, 19 bp, Homo sapiens
ggcgcgatctctgcctgca

SEQ ID NO: 19272 - DNA, 19 bp, Homo sapiens
gcgcgatctctgcctgcta

SEQ ID NO: 19273 - DNA, 19 bp, Homo sapiens
gcgatctctgcctgcttaa

SEQ ID NO: 19274 - DNA, 19 bp, Homo sapiens
cgatctctgcctgcttaca

SEQ ID NO: 19275 - DNA, 19 bp, Homo sapiens
gatctctgcctgcttacta

SEQ ID NO: 19276 - DNA, 19 bp, Homo sapiens
atctctgcctgcttactca

SEQ ID NO: 19277 - DNA, 19 bp, Homo sapiens
tctctgcctgcttactcga

SEQ ID NO: 19278 - DNA, 19 bp, Homo sapiens
ctctgcctgcttactcgga

SEQ ID NO: 19279 - DNA, 19 bp, Homo sapiens
gcctgcttactcgggaaaa

SEQ ID NO: 19280 - DNA, 19 bp, Homo sapiens
cctgcttactcgggaaata

SEQ ID NO: 19281 - DNA, 19 bp, Homo sapiens
ctgcttactcgggaaatta

SEQ ID NO: 19282 - DNA, 19 bp, Homo sapiens
tgcttactcgggaaattta

SEQ ID NO: 19283 - DNA, 19 bp, Homo sapiens
gcttactcgggaaatttga

SEQ ID NO: 19284 - DNA, 19 bp, Homo sapiens
cttactcgggaaatttgca

SEQ ID NO: 19285 - DNA, 19 bp, Homo sapiens
ttactcgggaaatttgcta

SEQ ID NO: 19286 - DNA, 19 bp, Homo sapiens
tactcgggaaatttgctta

SEQ ID NO: 19287 - DNA, 19 bp, Homo sapiens
actcgggaaatttgcttta

SEQ ID NO: 19288 - DNA, 19 bp, Homo sapiens
ctcgggaaatttgctttta

SEQ ID NO: 19289 - DNA, 19 bp, Homo sapiens
tcgggaaatttgcttttga

SEQ ID NO: 19290 - DNA, 19 bp, Homo sapiens
cgggaaatttgcttttgca

SEQ ID NO: 19291 - DNA, 19 bp, Homo sapiens
aaatttgcttttgccaaaa

SEQ ID NO: 19292 - DNA, 19 bp, Homo sapiens
aatttgcttttgccaaaca

SEQ ID NO: 19293 - DNA, 19 bp, Homo sapiens
atttgcttttgccaaacca

SEQ ID NO: 19294 - DNA, 19 bp, Homo sapiens
tttgcttttgccaaaccca

SEQ ID NO: 19295 - DNA, 19 bp, Homo sapiens
ttgcttttgccaaacccga

SEQ ID NO: 19296 - DNA, 19 bp, Homo sapiens
tgcttttgccaaacccgca

SEQ ID NO: 19297 - DNA, 19 bp, Homo sapiens
gcttttgccaaacccgcta

SEQ ID NO: 19298 - DNA, 19 bp, Homo sapiens
cttttgccaaacccgctta

SEQ ID NO: 19299 - DNA, 19 bp, Homo sapiens
ttttgccaaacccgcttta

SEQ ID NO: 19300 - DNA, 19 bp, Homo sapiens
tttgccaaacccgctttta

SEQ ID NO: 19301 - DNA, 19 bp, Homo sapiens
ttgccaaacccgcttttta

SEQ ID NO: 19302 - DNA, 19 bp, Homo sapiens
tgccaaacccgctttttca

SEQ ID NO: 19303 - DNA, 19 bp, Homo sapiens
gccaaacccgctttttcga

SEQ ID NO: 19304 - DNA, 19 bp, Homo sapiens
ccaaacccgctttttcgga

SEQ ID NO: 19305 - DNA, 19 bp, Homo sapiens
caaacccgctttttcggga

SEQ ID NO: 19306 - DNA, 19 bp, Homo sapiens
aacccgctttttcggggaa

SEQ ID NO: 19307 - DNA, 19 bp, Homo sapiens
acccgctttttcggggata

SEQ ID NO: 19308 - DNA, 19 bp, Homo sapiens
cccgctttttcggggatca

SEQ ID NO: 19309 - DNA, 19 bp, Homo sapiens
ccgctttttcggggatcca

SEQ ID NO: 19310 - DNA, 19 bp, Homo sapiens
cgctttttcggggatccca

SEQ ID NO: 19311 - DNA, 19 bp, Homo sapiens
gctttttcggggatcccga

SEQ ID NO: 19312 - DNA, 19 bp, Homo sapiens
ctttttcggggatcccgca

SEQ ID NO: 19313 - DNA, 19 bp, Homo sapiens
tttttcggggatcccgcga

SEQ ID NO: 19314 - DNA, 19 bp, Homo sapiens
ttttcggggatcccgcgca

SEQ ID NO: 19315 - DNA, 19 bp, Homo sapiens
tttcggggatcccgcgcca

SEQ ID NO: 19316 - DNA, 19 bp, Homo sapiens
ttcggggatcccgcgccca

SEQ ID NO: 19317 - DNA, 19 bp, Homo sapiens
tcggggatcccgcgcccca

SEQ ID NO: 19318 - DNA, 19 bp, Homo sapiens
cggggatcccgcgccccca

SEQ ID NO: 19319 - DNA, 19 bp, Homo sapiens
ggggatcccgcgcccccca

SEQ ID NO: 19320 - DNA, 19 bp, Homo sapiens
gggatcccgcgccccccta

SEQ ID NO: 19321 - DNA, 19 bp, Homo sapiens
ggatcccgcgcccccctca

SEQ ID NO: 19322 - DNA, 19 bp, Homo sapiens
gatcccgcgcccccctcca

SEQ ID NO: 19323 - DNA, 19 bp, Homo sapiens
atcccgcgcccccctccta

SEQ ID NO: 19324 - DNA, 19 bp, Homo sapiens
cccgcgcccccctcctcaa

SEQ ID NO: 19325 - DNA, 19 bp, Homo sapiens
ccgcgcccccctcctcaca

SEQ ID NO: 19326 - DNA, 19 bp, Homo sapiens
cgcgcccccctcctcacta

SEQ ID NO: 19327 - DNA, 19 bp, Homo sapiens
gcgcccccctcctcactta

SEQ ID NO: 19328 - DNA, 19 bp, Homo sapiens
cgcccccctcctcacttga

SEQ ID NO: 19329 - DNA, 19 bp, Homo sapiens
gcccccctcctcacttgca

SEQ ID NO: 19330 - DNA, 19 bp, Homo sapiens
cccccctcctcacttgcga

SEQ ID NO: 19331 - DNA, 19 bp, Homo sapiens
ccccctcctcacttgcgca

SEQ ID NO: 19332 - DNA, 19 bp, Homo sapiens
cccctcctcacttgcgcta

SEQ ID NO: 19333 - DNA, 19 bp, Homo sapiens
ccctcctcacttgcgctga

SEQ ID NO: 19334 - DNA, 19 bp, Homo sapiens
cctcctcacttgcgctgca

SEQ ID NO: 19335 - DNA, 19 bp, Homo sapiens
ctcctcacttgcgctgcta

SEQ ID NO: 19336 - DNA, 19 bp, Homo sapiens
tcctcacttgcgctgctca

SEQ ID NO: 19337 - DNA, 19 bp, Homo sapiens
cctcacttgcgctgctcta

SEQ ID NO: 19338 - DNA, 19 bp, Homo sapiens
ctcacttgcgctgctctca

SEQ ID NO: 19339 - DNA, 19 bp, Homo sapiens
tcacttgcgctgctctcga

SEQ ID NO: 19340 - DNA, 19 bp, Homo sapiens
acttgcgctgctctcggaa

SEQ ID NO: 19341 - DNA, 19 bp, Homo sapiens
cttgcgctgctctcggaga

SEQ ID NO: 19342 - DNA, 19 bp, Homo sapiens
ttgcgctgctctcggagca

SEQ ID NO: 19343 - DNA, 19 bp, Homo sapiens
tgcgctgctctcggagcca

SEQ ID NO: 19344 - DNA, 19 bp, Homo sapiens
gcgctgctctcggagccca

SEQ ID NO: 19345 - DNA, 19 bp, Homo sapiens
gctgctctcggagccccaa

SEQ ID NO: 19346 - DNA, 19 bp, Homo sapiens
ctgctctcggagccccaga

SEQ ID NO: 19347 - DNA, 19 bp, Homo sapiens
tgctctcggagccccagca

SEQ ID NO: 19348 - DNA, 19 bp, Homo sapiens
gctctcggagccccagcca

SEQ ID NO: 19349 - DNA, 19 bp, Homo sapiens
ctctcggagccccagccga

SEQ ID NO: 19350 - DNA, 19 bp, Homo sapiens
tctcggagccccagccgga

SEQ ID NO: 19351 - DNA, 19 bp, Homo sapiens
ctcggagccccagccggca

SEQ ID NO: 19352 - DNA, 19 bp, Homo sapiens
tcggagccccagccggcta

SEQ ID NO: 19353 - DNA, 19 bp, Homo sapiens
cggagccccagccggctca

SEQ ID NO: 19354 - DNA, 19 bp, Homo sapiens
ggagccccagccggctcca

SEQ ID NO: 19355 - DNA, 19 bp, Homo sapiens
gagccccagccggctccga

SEQ ID NO: 19356 - DNA, 19 bp, Homo sapiens
agccccagccggctccgca

SEQ ID NO: 19357 - DNA, 19 bp, Homo sapiens
gccccagccggctccgcca

SEQ ID NO: 19358 - DNA, 19 bp, Homo sapiens
ccccagccggctccgccca

SEQ ID NO: 19359 - DNA, 19 bp, Homo sapiens
cccagccggctccgcccga

SEQ ID NO: 19360 - DNA, 19 bp, Homo sapiens
ccagccggctccgcccgca

SEQ ID NO: 19361 - DNA, 19 bp, Homo sapiens
cagccggctccgcccgcta

SEQ ID NO: 19362 - DNA, 19 bp, Homo sapiens
agccggctccgcccgctta

SEQ ID NO: 19363 - DNA, 19 bp, Homo sapiens
gccggctccgcccgcttca

SEQ ID NO: 19364 - DNA, 19 bp, Homo sapiens
ccggctccgcccgcttcga

SEQ ID NO: 19365 - DNA, 19 bp, Homo sapiens
cggctccgcccgcttcgga

SEQ ID NO: 19366 - DNA, 19 bp, Homo sapiens
ggctccgcccgcttcggca

SEQ ID NO: 19367 - DNA, 19 bp, Homo sapiens
gctccgcccgcttcggcga

SEQ ID NO: 19368 - DNA, 19 bp, Homo sapiens
ctccgcccgcttcggcgga

SEQ ID NO: 19369 - DNA, 19 bp, Homo sapiens
tccgcccgcttcggcggta

SEQ ID NO: 19370 - DNA, 19 bp, Homo sapiens
ccgcccgcttcggcggtta

SEQ ID NO: 19371 - DNA, 19 bp, Homo sapiens
cgcccgcttcggcggttta

SEQ ID NO: 19372 - DNA, 19 bp, Homo sapiens
gcccgcttcggcggtttga

SEQ ID NO: 19373 - DNA, 19 bp, Homo sapiens
ccgcttcggcggtttggaa

SEQ ID NO: 19374 - DNA, 19 bp, Homo sapiens
gcttcggcggtttggataa

SEQ ID NO: 19375 - DNA, 19 bp, Homo sapiens
cttcggcggtttggatata

SEQ ID NO: 19376 - DNA, 19 bp, Homo sapiens
ttcggcggtttggatatta

SEQ ID NO: 19377 - DNA, 19 bp, Homo sapiens
cggcggtttggatatttaa

SEQ ID NO: 19378 - DNA, 19 bp, Homo sapiens
ggcggtttggatatttata

SEQ ID NO: 19379 - DNA, 19 bp, Homo sapiens
gcggtttggatatttatta

SEQ ID NO: 19380 - DNA, 19 bp, Homo sapiens
ggtttggatatttattgaa

SEQ ID NO: 19381 - DNA, 19 bp, Homo sapiens
gtttggatatttattgaca

SEQ ID NO: 19382 - DNA, 19 bp, Homo sapiens
tttggatatttattgacca

SEQ ID NO: 19383 - DNA, 19 bp, Homo sapiens
ttggatatttattgaccta

SEQ ID NO: 19384 - DNA, 19 bp, Homo sapiens
tggatatttattgacctca

SEQ ID NO: 19385 - DNA, 19 bp, Homo sapiens
ggatatttattgacctcga

SEQ ID NO: 19386 - DNA, 19 bp, Homo sapiens
gatatttattgacctcgta

SEQ ID NO: 19387 - DNA, 19 bp, Homo sapiens
atatttattgacctcgtca

SEQ ID NO: 19388 - DNA, 19 bp, Homo sapiens
tatttattgacctcgtcca

SEQ ID NO: 19389 - DNA, 19 bp, Homo sapiens
atttattgacctcgtccta

SEQ ID NO: 19390 - DNA, 19 bp, Homo sapiens
tttattgacctcgtcctca

SEQ ID NO: 19391 - DNA, 19 bp, Homo sapiens
ttattgacctcgtcctcca

SEQ ID NO: 19392 - DNA, 19 bp, Homo sapiens
attgacctcgtcctccgaa

SEQ ID NO: 19393 - DNA, 19 bp, Homo sapiens
ttgacctcgtcctccgaca

SEQ ID NO: 19394 - DNA, 19 bp, Homo sapiens
tgacctcgtcctccgacta

SEQ ID NO: 19395 - DNA, 19 bp, Homo sapiens
gacctcgtcctccgactca

SEQ ID NO: 19396 - DNA, 19 bp, Homo sapiens
acctcgtcctccgactcga

SEQ ID NO: 19397 - DNA, 19 bp, Homo sapiens
cctcgtcctccgactcgca

SEQ ID NO: 19398 - DNA, 19 bp, Homo sapiens
ctcgtcctccgactcgcta

SEQ ID NO: 19399 - DNA, 19 bp, Homo sapiens
cgtcctccgactcgctgaa

SEQ ID NO: 19400 - DNA, 19 bp, Homo sapiens
tcctccgactcgctgacaa

SEQ ID NO: 19401 - DNA, 19 bp, Homo sapiens
cctccgactcgctgacaga

SEQ ID NO: 19402 - DNA, 19 bp, Homo sapiens
ctccgactcgctgacagga

SEQ ID NO: 19403 - DNA, 19 bp, Homo sapiens
tccgactcgctgacaggca

SEQ ID NO: 19404 - DNA, 19 bp, Homo sapiens
cgactcgctgacaggctaa

SEQ ID NO: 19405 - DNA, 19 bp, Homo sapiens
actcgctgacaggctacaa

SEQ ID NO: 19406 - DNA, 19 bp, Homo sapiens
ctcgctgacaggctacaga

SEQ ID NO: 19407 - DNA, 19 bp, Homo sapiens
cgctgacaggctacaggaa

SEQ ID NO: 19408 - DNA, 19 bp, Homo sapiens
gctgacaggctacaggaca

SEQ ID NO: 19409 - DNA, 19 bp, Homo sapiens
ctgacaggctacaggacca

SEQ ID NO: 19410 - DNA, 19 bp, Homo sapiens
tgacaggctacaggaccca

SEQ ID NO: 19411 - DNA, 19 bp, Homo sapiens
gacaggctacaggacccca

SEQ ID NO: 19412 - DNA, 19 bp, Homo sapiens
aggctacaggacccccaaa

SEQ ID NO: 19413 - DNA, 19 bp, Homo sapiens
ctacaggacccccaacaaa

SEQ ID NO: 19414 - DNA, 19 bp, Homo sapiens
tacaggacccccaacaaca

SEQ ID NO: 19415 - DNA, 19 bp, Homo sapiens
acaggacccccaacaacca

SEQ ID NO: 19416 - DNA, 19 bp, Homo sapiens
caggacccccaacaaccca

SEQ ID NO: 19417 - DNA, 19 bp, Homo sapiens
gacccccaacaaccccaaa

SEQ ID NO: 19418 - DNA, 19 bp, Homo sapiens
acccccaacaaccccaata

SEQ ID NO: 19419 - DNA, 19 bp, Homo sapiens
cccccaacaaccccaatca

SEQ ID NO: 19420 - DNA, 19 bp, Homo sapiens
cccaacaaccccaatccaa

SEQ ID NO: 19421 - DNA, 19 bp, Homo sapiens
ccaacaaccccaatccaca

SEQ ID NO: 19422 - DNA, 19 bp, Homo sapiens
caacaaccccaatccacga

SEQ ID NO: 19423 - DNA, 19 bp, Homo sapiens
aacaaccccaatccacgta

SEQ ID NO: 19424 - DNA, 19 bp, Homo sapiens
acaaccccaatccacgtta

SEQ ID NO: 19425 - DNA, 19 bp, Homo sapiens
caaccccaatccacgttta

SEQ ID NO: 19426 - DNA, 19 bp, Homo sapiens
aaccccaatccacgtttta

SEQ ID NO: 19427 - DNA, 19 bp, Homo sapiens
accccaatccacgttttga

SEQ ID NO: 19428 - DNA, 19 bp, Homo sapiens
cccaatccacgttttggaa

SEQ ID NO: 19429 - DNA, 19 bp, Homo sapiens
ccaatccacgttttggata

SEQ ID NO: 19430 - DNA, 19 bp, Homo sapiens
caatccacgttttggatga

SEQ ID NO: 19431 - DNA, 19 bp, Homo sapiens
atccacgttttggatgcaa

SEQ ID NO: 19432 - DNA, 19 bp, Homo sapiens
tccacgttttggatgcaca

SEQ ID NO: 19433 - DNA, 19 bp, Homo sapiens
ccacgttttggatgcacta

SEQ ID NO: 19434 - DNA, 19 bp, Homo sapiens
acgttttggatgcactgaa

SEQ ID NO: 19435 - DNA, 19 bp, Homo sapiens
gttttggatgcactgagaa

SEQ ID NO: 19436 - DNA, 19 bp, Homo sapiens
ttttggatgcactgagaca

SEQ ID NO: 19437 - DNA, 19 bp, Homo sapiens
tttggatgcactgagacca

SEQ ID NO: 19438 - DNA, 19 bp, Homo sapiens
ttggatgcactgagaccca

SEQ ID NO: 19439 - DNA, 19 bp, Homo sapiens
tggatgcactgagacccca

SEQ ID NO: 19440 - DNA, 19 bp, Homo sapiens
gatgcactgagaccccgaa

SEQ ID NO: 19441 - DNA, 19 bp, Homo sapiens
tgcactgagaccccgacaa

SEQ ID NO: 19442 - DNA, 19 bp, Homo sapiens
gcactgagaccccgacata

SEQ ID NO: 19443 - DNA, 19 bp, Homo sapiens
cactgagaccccgacatta

SEQ ID NO: 19444 - DNA, 19 bp, Homo sapiens
actgagaccccgacattca

SEQ ID NO: 19445 - DNA, 19 bp, Homo sapiens
ctgagaccccgacattcca

SEQ ID NO: 19446 - DNA, 19 bp, Homo sapiens
tgagaccccgacattccta

SEQ ID NO: 19447 - DNA, 19 bp, Homo sapiens
gagaccccgacattcctca

SEQ ID NO: 19448 - DNA, 19 bp, Homo sapiens
agaccccgacattcctcga

SEQ ID NO: 19449 - DNA, 19 bp, Homo sapiens
gaccccgacattcctcgga

SEQ ID NO: 19450 - DNA, 19 bp, Homo sapiens
ccccgacattcctcggtaa

SEQ ID NO: 19451 - DNA, 19 bp, Homo sapiens
cccgacattcctcggtata

SEQ ID NO: 19452 - DNA, 19 bp, Homo sapiens
ccgacattcctcggtatta

SEQ ID NO: 19453 - DNA, 19 bp, Homo sapiens
gacattcctcggtatttaa

SEQ ID NO: 19454 - DNA, 19 bp, Homo sapiens
acattcctcggtatttata

SEQ ID NO: 19455 - DNA, 19 bp, Homo sapiens
cattcctcggtatttatta

SEQ ID NO: 19456 - DNA, 19 bp, Homo sapiens
attcctcggtatttattga

SEQ ID NO: 19457 - DNA, 19 bp, Homo sapiens
ttcctcggtatttattgta

SEQ ID NO: 19458 - DNA, 19 bp, Homo sapiens
tcctcggtatttattgtca

SEQ ID NO: 19459 - DNA, 19 bp, Homo sapiens
cctcggtatttattgtcta

SEQ ID NO: 19460 - DNA, 19 bp, Homo sapiens
ctcggtatttattgtctga

SEQ ID NO: 19461 - DNA, 19 bp, Homo sapiens
tcggtatttattgtctgta

SEQ ID NO: 19462 - DNA, 19 bp, Homo sapiens
cggtatttattgtctgtca

SEQ ID NO: 19463 - DNA, 19 bp, Homo sapiens
ggtatttattgtctgtcca

SEQ ID NO: 19464 - DNA, 19 bp, Homo sapiens
gtatttattgtctgtccca

SEQ ID NO: 19465 - DNA, 19 bp, Homo sapiens
atttattgtctgtccccaa

SEQ ID NO: 19466 - DNA, 19 bp, Homo sapiens
tttattgtctgtccccaca

SEQ ID NO: 19467 - DNA, 19 bp, Homo sapiens
ttattgtctgtccccacca

SEQ ID NO: 19468 - DNA, 19 bp, Homo sapiens
attgtctgtccccacctaa

SEQ ID NO: 19469 - DNA, 19 bp, Homo sapiens
ttgtctgtccccacctaga

SEQ ID NO: 19470 - DNA, 19 bp, Homo sapiens
gtctgtccccacctaggaa

SEQ ID NO: 19471 - DNA, 19 bp, Homo sapiens
tctgtccccacctaggaca

SEQ ID NO: 19472 - DNA, 19 bp, Homo sapiens
ctgtccccacctaggacca

SEQ ID NO: 19473 - DNA, 19 bp, Homo sapiens
tgtccccacctaggaccca

SEQ ID NO: 19474 - DNA, 19 bp, Homo sapiens
gtccccacctaggacccca

SEQ ID NO: 19475 - DNA, 19 bp, Homo sapiens
ccccacctaggacccccaa

SEQ ID NO: 19476 - DNA, 19 bp, Homo sapiens
cccacctaggacccccaca

SEQ ID NO: 19477 - DNA, 19 bp, Homo sapiens
ccacctaggacccccacca

SEQ ID NO: 19478 - DNA, 19 bp, Homo sapiens
cacctaggacccccaccca

SEQ ID NO: 19479 - DNA, 19 bp, Homo sapiens
acctaggacccccacccca

SEQ ID NO: 19480 - DNA, 19 bp, Homo sapiens
cctaggacccccaccccca

SEQ ID NO: 19481 - DNA, 19 bp, Homo sapiens
taggacccccacccccgaa

SEQ ID NO: 19482 - DNA, 19 bp, Homo sapiens
aggacccccacccccgaca

SEQ ID NO: 19483 - DNA, 19 bp, Homo sapiens
ggacccccacccccgacca

SEQ ID NO: 19484 - DNA, 19 bp, Homo sapiens
gacccccacccccgaccca

SEQ ID NO: 19485 - DNA, 19 bp, Homo sapiens
acccccacccccgacccta

SEQ ID NO: 19486 - DNA, 19 bp, Homo sapiens
cccccacccccgaccctca

SEQ ID NO: 19487 - DNA, 19 bp, Homo sapiens
ccccacccccgaccctcga

SEQ ID NO: 19488 - DNA, 19 bp, Homo sapiens
cccacccccgaccctcgca

SEQ ID NO: 19489 - DNA, 19 bp, Homo sapiens
acccccgaccctcgcgaaa

SEQ ID NO: 19490 - DNA, 19 bp, Homo sapiens
cgaccctcgcgaataaaaa

SEQ ID NO: 19491 - DNA, 19 bp, Homo sapiens
gaccctcgcgaataaaaga

SEQ ID NO: 19492 - DNA, 19 bp, Homo sapiens
accctcgcgaataaaagga

SEQ ID NO: 19493 - DNA, 19 bp, Homo sapiens
ccctcgcgaataaaaggca

SEQ ID NO: 19494 - DNA, 19 bp, Homo sapiens
cctcgcgaataaaaggcca

SEQ ID NO: 19495 - DNA, 19 bp, Homo sapiens
ctcgcgaataaaaggccca

SEQ ID NO: 19496 - DNA, 19 bp, Homo sapiens
tcgcgaataaaaggcccta

SEQ ID NO: 19497 - DNA, 19 bp, Homo sapiens
cgcgaataaaaggccctca

SEQ ID NO: 19498 - DNA, 19 bp, Homo sapiens
cgaataaaaggccctccaa

SEQ ID NO: 19499 - DNA, 19 bp, Homo sapiens
gaataaaaggccctccata

SEQ ID NO: 19500 - DNA, 19 bp, Homo sapiens
aataaaaggccctccatca

SEQ ID NO: 19501 - DNA, 19 bp, Homo sapiens
ataaaaggccctccatcta

SEQ ID NO: 19502 - DNA, 19 bp, Homo sapiens
taaaaggccctccatctga

SEQ ID NO: 19503 - DNA, 19 bp, Homo sapiens
aaaaggccctccatctgca

SEQ ID NO: 19504 - DNA, 19 bp, Homo sapiens
aaaggccctccatctgcca

SEQ ID NO: 19505 - DNA, 19 bp, Homo sapiens
gccctccatctgcccaaaa

SEQ ID NO: 19506 - DNA, 19 bp, Homo sapiens
ccctccatctgcccaaaga

SEQ ID NO: 19507 - DNA, 19 bp, Homo sapiens
cctccatctgcccaaagca

SEQ ID NO: 19508 - DNA, 19 bp, Homo sapiens
ctccatctgcccaaagcta

SEQ ID NO: 19509 - DNA, 19 bp, Homo sapiens
tccatctgcccaaagctca

SEQ ID NO: 19510 - DNA, 19 bp, Homo sapiens
ccatctgcccaaagctcta

SEQ ID NO: 19511 - DNA, 19 bp, Homo sapiens
catctgcccaaagctctga

SEQ ID NO: 19512 - DNA, 19 bp, Homo sapiens
agcagcagcagcagcagca

SEQ ID NO: 19513 - DNA, 19 bp, Homo sapiens
tgcagcagcagcagcagca

SEQ ID NO: 19514 - DNA, 23 bp, Homo sapiens
tggctgtcccctgggcctctctg

SEQ ID NO: 19515 - DNA, 23 bp, Homo sapiens
ctggctgtcccctgggcctctct

SEQ ID NO: 19516 - DNA, 23 bp, Homo sapiens
cctggctgtcccctgggcctctc

SEQ ID NO: 19517 - DNA, 23 bp, Homo sapiens
ccctggctgtcccctgggcctct

SEQ ID NO: 19518 - DNA, 23 bp, Homo sapiens
tccctggctgtcccctgggcctc

SEQ ID NO: 19519 - DNA, 23 bp, Homo sapiens
gtccctggctgtcccctgggcct

SEQ ID NO: 19520 - DNA, 23 bp, Homo sapiens
tgtccctggctgtcccctgggcc

SEQ ID NO: 19521 - DNA, 23 bp, Homo sapiens
ctgtccctggctgtcccctgggc

SEQ ID NO: 19522 - DNA, 23 bp, Homo sapiens
cctgtccctggctgtcccctggg

SEQ ID NO: 19523 - DNA, 23 bp, Homo sapiens
gcctgtccctggctgtcccctgg

SEQ ID NO: 19524 - DNA, 23 bp, Homo sapiens
tgcctgtccctggctgtcccctg

SEQ ID NO: 19525 - DNA, 23 bp, Homo sapiens
ctgcctgtccctggctgtcccct

SEQ ID NO: 19526 - DNA, 23 bp, Homo sapiens
tctgcctgtccctggctgtcccc

SEQ ID NO: 19527 - DNA, 23 bp, Homo sapiens
gtctgcctgtccctggctgtccc

SEQ ID NO: 19528 - DNA, 23 bp, Homo sapiens
tgtctgcctgtccctggctgtcc

SEQ ID NO: 19529 - DNA, 23 bp, Homo sapiens
atgtctgcctgtccctggctgtc

SEQ ID NO: 19530 - DNA, 23 bp, Homo sapiens
catgtctgcctgtccctggctgt

SEQ ID NO: 19531 - DNA, 23 bp, Homo sapiens
gcatgtctgcctgtccctggctg

SEQ ID NO: 19532 - DNA, 23 bp, Homo sapiens
tgcatgtctgcctgtccctggct

SEQ ID NO: 19533 - DNA, 23 bp, Homo sapiens
ctgcatgtctgcctgtccctggc

SEQ ID NO: 19534 - DNA, 23 bp, Homo sapiens
gctgcatgtctgcctgtccctgg

SEQ ID NO: 19535 - DNA, 23 bp, Homo sapiens
ggctgcatgtctgcctgtccctg

SEQ ID NO: 19536 - DNA, 23 bp, Homo sapiens
tggctgcatgtctgcctgtccct

SEQ ID NO: 19537 - DNA, 23 bp, Homo sapiens
ctggctgcatgtctgcctgtccc

SEQ ID NO: 19538 - DNA, 23 bp, Homo sapiens
cctggctgcatgtctgcctgtcc

SEQ ID NO: 19539 - DNA, 23 bp, Homo sapiens
ccctggctgcatgtctgcctgtc

SEQ ID NO: 19540 - DNA, 23 bp, Homo sapiens
gccctggctgcatgtctgcctgt

SEQ ID NO: 19541 - DNA, 23 bp, Homo sapiens
agccctggctgcatgtctgcctg

SEQ ID NO: 19542 - DNA, 23 bp, Homo sapiens
gagccctggctgcatgtctgcct

SEQ ID NO: 19543 - DNA, 23 bp, Homo sapiens
ggagccctggctgcatgtctgcc

SEQ ID NO: 19544 - DNA, 23 bp, Homo sapiens
tggagccctggctgcatgtctgc

SEQ ID NO: 19545 - DNA, 23 bp, Homo sapiens
ctggagccctggctgcatgtctg

SEQ ID NO: 19546 - DNA, 23 bp, Homo sapiens
cctggagccctggctgcatgtct

SEQ ID NO: 19547 - DNA, 23 bp, Homo sapiens
ccctggagccctggctgcatgtc

SEQ ID NO: 19548 - DNA, 23 bp, Homo sapiens
gccctggagccctggctgcatgt

SEQ ID NO: 19549 - DNA, 23 bp, Homo sapiens
ggccctggagccctggctgcatg

SEQ ID NO: 19550 - DNA, 23 bp, Homo sapiens
aggccctggagccctggctgcat

SEQ ID NO: 19551 - DNA, 23 bp, Homo sapiens
caggccctggagccctggctgca

SEQ ID NO: 19552 - DNA, 23 bp, Homo sapiens
ccaggccctggagccctggctgc

SEQ ID NO: 19553 - DNA, 23 bp, Homo sapiens
tccaggccctggagccctggctg

SEQ ID NO: 19554 - DNA, 23 bp, Homo sapiens
gtccaggccctggagccctggct

SEQ ID NO: 19555 - DNA, 23 bp, Homo sapiens
tgtccaggccctggagccctggc

SEQ ID NO: 19556 - DNA, 23 bp, Homo sapiens
ctgtccaggccctggagccctgg

SEQ ID NO: 19557 - DNA, 23 bp, Homo sapiens
cctgtccaggccctggagccctg

SEQ ID NO: 19558 - DNA, 23 bp, Homo sapiens
ccctgtccaggccctggagccct

SEQ ID NO: 19559 - DNA, 23 bp, Homo sapiens
cccctgtccaggccctggagccc

SEQ ID NO: 19560 - DNA, 23 bp, Homo sapiens
gcccctgtccaggccctggagcc

SEQ ID NO: 19561 - DNA, 23 bp, Homo sapiens
agcccctgtccaggccctggagc

SEQ ID NO: 19562 - DNA, 23 bp, Homo sapiens
cagcccctgtccaggccctggag

SEQ ID NO: 19563 - DNA, 23 bp, Homo sapiens
gcagcccctgtccaggccctgga

SEQ ID NO: 19564 - DNA, 23 bp, Homo sapiens
ggcagcccctgtccaggccctgg

SEQ ID NO: 19565 - DNA, 23 bp, Homo sapiens
tggcagcccctgtccaggccctg

SEQ ID NO: 19566 - DNA, 23 bp, Homo sapiens
ctggcagcccctgtccaggccct

SEQ ID NO: 19567 - DNA, 23 bp, Homo sapiens
cctggcagcccctgtccaggccc

SEQ ID NO: 19568 - DNA, 23 bp, Homo sapiens
gcctggcagcccctgtccaggcc

SEQ ID NO: 19569 - DNA, 23 bp, Homo sapiens
ggcctggcagcccctgtccaggc

SEQ ID NO: 19570 - DNA, 23 bp, Homo sapiens
gggcctggcagcccctgtccagg

SEQ ID NO: 19571 - DNA, 23 bp, Homo sapiens
agggcctggcagcccctgtccag

SEQ ID NO: 19572 - DNA, 23 bp, Homo sapiens
cagggcctggcagcccctgtcca

SEQ ID NO: 19573 - DNA, 23 bp, Homo sapiens
acagggcctggcagcccctgtcc

SEQ ID NO: 19574 - DNA, 23 bp, Homo sapiens
cacagggcctggcagcccctgtc

SEQ ID NO: 19575 - DNA, 23 bp, Homo sapiens
tcacagggcctggcagcccctgt

SEQ ID NO: 19576 - DNA, 23 bp, Homo sapiens
gtcacagggcctggcagcccctg

SEQ ID NO: 19577 - DNA, 23 bp, Homo sapiens
tgtcacagggcctggcagcccct

SEQ ID NO: 19578 - DNA, 23 bp, Homo sapiens
ctgtcacagggcctggcagcccc

SEQ ID NO: 19579 - DNA, 23 bp, Homo sapiens
cctgtcacagggcctggcagccc

SEQ ID NO: 19580 - DNA, 23 bp, Homo sapiens
tcctgtcacagggcctggcagcc

SEQ ID NO: 19581 - DNA, 23 bp, Homo sapiens
ctcctgtcacagggcctggcagc

SEQ ID NO: 19582 - DNA, 23 bp, Homo sapiens
cctcctgtcacagggcctggcag

SEQ ID NO: 19583 - DNA, 23 bp, Homo sapiens
tcctcctgtcacagggcctggca

SEQ ID NO: 19584 - DNA, 23 bp, Homo sapiens
gtcctcctgtcacagggcctggc

SEQ ID NO: 19585 - DNA, 23 bp, Homo sapiens
ggtcctcctgtcacagggcctgg

SEQ ID NO: 19586 - DNA, 23 bp, Homo sapiens
gggtcctcctgtcacagggcctg

SEQ ID NO: 19587 - DNA, 23 bp, Homo sapiens
ggggtcctcctgtcacagggcct

SEQ ID NO: 19588 - DNA, 23 bp, Homo sapiens
cggggtcctcctgtcacagggcc

SEQ ID NO: 19589 - DNA, 23 bp, Homo sapiens
tcggggtcctcctgtcacagggc

SEQ ID NO: 19590 - DNA, 23 bp, Homo sapiens
ctcggggtcctcctgtcacaggg

SEQ ID NO: 19591 - DNA, 23 bp, Homo sapiens
gctcggggtcctcctgtcacagg

SEQ ID NO: 19592 - DNA, 23 bp, Homo sapiens
ggctcggggtcctcctgtcacag

SEQ ID NO: 19593 - DNA, 23 bp, Homo sapiens
gggctcggggtcctcctgtcaca

SEQ ID NO: 19594 - DNA, 23 bp, Homo sapiens
ggggctcggggtcctcctgtcac

SEQ ID NO: 19595 - DNA, 23 bp, Homo sapiens
gggggctcggggtcctcctgtca

SEQ ID NO: 19596 - DNA, 23 bp, Homo sapiens
cgggggctcggggtcctcctgtc

SEQ ID NO: 19597 - DNA, 23 bp, Homo sapiens
ccgggggctcggggtcctcctgt

SEQ ID NO: 19598 - DNA, 23 bp, Homo sapiens
gccgggggctcggggtcctcctg

SEQ ID NO: 19599 - DNA, 23 bp, Homo sapiens
ggccgggggctcggggtcctcct

SEQ ID NO: 19600 - DNA, 23 bp, Homo sapiens
gggccgggggctcggggtcctcc

SEQ ID NO: 19601 - DNA, 23 bp, Homo sapiens
cgggccgggggctcggggtcctc

SEQ ID NO: 19602 - DNA, 23 bp, Homo sapiens
ccgggccgggggctcggggtcct

SEQ ID NO: 19603 - DNA, 23 bp, Homo sapiens
cccgggccgggggctcggggtcc

SEQ ID NO: 19604 - DNA, 23 bp, Homo sapiens
ccccgggccgggggctcggggtc

SEQ ID NO: 19605 - DNA, 23 bp, Homo sapiens
tccccgggccgggggctcggggt

SEQ ID NO: 19606 - DNA, 23 bp, Homo sapiens
ctccccgggccgggggctcgggg

SEQ ID NO: 19607 - DNA, 23 bp, Homo sapiens
cctccccgggccgggggctcggg

SEQ ID NO: 19608 - DNA, 23 bp, Homo sapiens
ccctccccgggccgggggctcgg

SEQ ID NO: 19609 - DNA, 23 bp, Homo sapiens
cccctccccgggccgggggctcg

SEQ ID NO: 19610 - DNA, 23 bp, Homo sapiens
gcccctccccgggccgggggctc

SEQ ID NO: 19611 - DNA, 23 bp, Homo sapiens
ggcccctccccgggccgggggct

SEQ ID NO: 19612 - DNA, 23 bp, Homo sapiens
tggcccctccccgggccgggggc

SEQ ID NO: 19613 - DNA, 23 bp, Homo sapiens
atggcccctccccgggccggggg

SEQ ID NO: 19614 - DNA, 23 bp, Homo sapiens
catggcccctccccgggccgggg

SEQ ID NO: 19615 - DNA, 23 bp, Homo sapiens
ccatggcccctccccgggccggg

SEQ ID NO: 19616 - DNA, 23 bp, Homo sapiens
accatggcccctccccgggccgg

SEQ ID NO: 19617 - DNA, 23 bp, Homo sapiens
caccatggcccctccccgggccg

SEQ ID NO: 19618 - DNA, 23 bp, Homo sapiens
gcaccatggcccctccccgggcc

SEQ ID NO: 19619 - DNA, 23 bp, Homo sapiens
agcaccatggcccctccccgggc

SEQ ID NO: 19620 - DNA, 23 bp, Homo sapiens
cagcaccatggcccctccccggg

SEQ ID NO: 19621 - DNA, 23 bp, Homo sapiens
gcagcaccatggcccctccccgg

SEQ ID NO: 19622 - DNA, 23 bp, Homo sapiens
ggcagcaccatggcccctccccg

SEQ ID NO: 19623 - DNA, 23 bp, Homo sapiens
aggcagcaccatggcccctcccc

SEQ ID NO: 19624 - DNA, 23 bp, Homo sapiens
caggcagcaccatggcccctccc

SEQ ID NO: 19625 - DNA, 23 bp, Homo sapiens
acaggcagcaccatggcccctcc

SEQ ID NO: 19626 - DNA, 23 bp, Homo sapiens
gacaggcagcaccatggcccctc

SEQ ID NO: 19627 - DNA, 23 bp, Homo sapiens
ggacaggcagcaccatggcccct

SEQ ID NO: 19628 - DNA, 23 bp, Homo sapiens
tggacaggcagcaccatggcccc

SEQ ID NO: 19629 - DNA, 23 bp, Homo sapiens
ttggacaggcagcaccatggccc

SEQ ID NO: 19630 - DNA, 23 bp, Homo sapiens
gttggacaggcagcaccatggcc

SEQ ID NO: 19631 - DNA, 23 bp, Homo sapiens
tgttggacaggcagcaccatggc

SEQ ID NO: 19632 - DNA, 23 bp, Homo sapiens
atgttggacaggcagcaccatgg

SEQ ID NO: 19633 - DNA, 23 bp, Homo sapiens
catgttggacaggcagcaccatg

SEQ ID NO: 19634 - DNA, 23 bp, Homo sapiens
acatgttggacaggcagcaccat

SEQ ID NO: 19635 - DNA, 23 bp, Homo sapiens
gacatgttggacaggcagcacca

SEQ ID NO: 19636 - DNA, 23 bp, Homo sapiens
tgacatgttggacaggcagcacc

SEQ ID NO: 19637 - DNA, 23 bp, Homo sapiens
ctgacatgttggacaggcagcac

SEQ ID NO: 19638 - DNA, 23 bp, Homo sapiens
gctgacatgttggacaggcagca

SEQ ID NO: 19639 - DNA, 23 bp, Homo sapiens
ggctgacatgttggacaggcagc

SEQ ID NO: 19640 - DNA, 23 bp, Homo sapiens
cggctgacatgttggacaggcag

SEQ ID NO: 19641 - DNA, 23 bp, Homo sapiens
tcggctgacatgttggacaggca

SEQ ID NO: 19642 - DNA, 23 bp, Homo sapiens
ctcggctgacatgttggacaggc

SEQ ID NO: 19643 - DNA, 23 bp, Homo sapiens
cctcggctgacatgttggacagg

SEQ ID NO: 19644 - DNA, 23 bp, Homo sapiens
acctcggctgacatgttggacag

SEQ ID NO: 19645 - DNA, 23 bp, Homo sapiens
cacctcggctgacatgttggaca

SEQ ID NO: 19646 - DNA, 23 bp, Homo sapiens
gcacctcggctgacatgttggac

SEQ ID NO: 19647 - DNA, 23 bp, Homo sapiens
cgcacctcggctgacatgttgga

SEQ ID NO: 19648 - DNA, 23 bp, Homo sapiens
ccgcacctcggctgacatgttgg

SEQ ID NO: 19649 - DNA, 23 bp, Homo sapiens
gccgcacctcggctgacatgttg

SEQ ID NO: 19650 - DNA, 23 bp, Homo sapiens
agccgcacctcggctgacatgtt

SEQ ID NO: 19651 - DNA, 23 bp, Homo sapiens
cagccgcacctcggctgacatgt

SEQ ID NO: 19652 - DNA, 23 bp, Homo sapiens
tcagccgcacctcggctgacatg

SEQ ID NO: 19653 - DNA, 23 bp, Homo sapiens
ctcagccgcacctcggctgacat

SEQ ID NO: 19654 - DNA, 23 bp, Homo sapiens
cctcagccgcacctcggctgaca

SEQ ID NO: 19655 - DNA, 23 bp, Homo sapiens
gcctcagccgcacctcggctgac

SEQ ID NO: 19656 - DNA, 23 bp, Homo sapiens
cgcctcagccgcacctcggctga

SEQ ID NO: 19657 - DNA, 23 bp, Homo sapiens
ccgcctcagccgcacctcggctg

SEQ ID NO: 19658 - DNA, 23 bp, Homo sapiens
gccgcctcagccgcacctcggct

SEQ ID NO: 19659 - DNA, 23 bp, Homo sapiens
agccgcctcagccgcacctcggc

SEQ ID NO: 19660 - DNA, 23 bp, Homo sapiens
gagccgcctcagccgcacctcgg

SEQ ID NO: 19661 - DNA, 23 bp, Homo sapiens
ggagccgcctcagccgcacctcg

SEQ ID NO: 19662 - DNA, 23 bp, Homo sapiens
tggagccgcctcagccgcacctc

SEQ ID NO: 19663 - DNA, 23 bp, Homo sapiens
ctggagccgcctcagccgcacct

SEQ ID NO: 19664 - DNA, 23 bp, Homo sapiens
gctggagccgcctcagccgcacc

SEQ ID NO: 19665 - DNA, 23 bp, Homo sapiens
tgctggagccgcctcagccgcac

SEQ ID NO: 19666 - DNA, 23 bp, Homo sapiens
ctgctggagccgcctcagccgca

SEQ ID NO: 19667 - DNA, 23 bp, Homo sapiens
gctgctggagccgcctcagccgc

SEQ ID NO: 19668 - DNA, 23 bp, Homo sapiens
agctgctggagccgcctcagccg

SEQ ID NO: 19669 - DNA, 23 bp, Homo sapiens
cagctgctggagccgcctcagcc

SEQ ID NO: 19670 - DNA, 23 bp, Homo sapiens
ccagctgctggagccgcctcagc

SEQ ID NO: 19671 - DNA, 23 bp, Homo sapiens
accagctgctggagccgcctcag

SEQ ID NO: 19672 - DNA, 23 bp, Homo sapiens
caccagctgctggagccgcctca

SEQ ID NO: 19673 - DNA, 23 bp, Homo sapiens
acaccagctgctggagccgcctc

SEQ ID NO: 19674 - DNA, 23 bp, Homo sapiens
aacaccagctgctggagccgcct

SEQ ID NO: 19675 - DNA, 23 bp, Homo sapiens
caacaccagctgctggagccgcc

SEQ ID NO: 19676 - DNA, 23 bp, Homo sapiens
ccaacaccagctgctggagccgc

SEQ ID NO: 19677 - DNA, 23 bp, Homo sapiens
tccaacaccagctgctggagccg

SEQ ID NO: 19678 - DNA, 23 bp, Homo sapiens
gtccaacaccagctgctggagcc

SEQ ID NO: 19679 - DNA, 23 bp, Homo sapiens
ggtccaacaccagctgctggagc

SEQ ID NO: 19680 - DNA, 23 bp, Homo sapiens
gggtccaacaccagctgctggag

SEQ ID NO: 19681 - DNA, 23 bp, Homo sapiens
cgggtccaacaccagctgctgga

SEQ ID NO: 19682 - DNA, 23 bp, Homo sapiens
ccgggtccaacaccagctgctgg

SEQ ID NO: 19683 - DNA, 23 bp, Homo sapiens
cccgggtccaacaccagctgctg

SEQ ID NO: 19684 - DNA, 23 bp, Homo sapiens
gcccgggtccaacaccagctgct

SEQ ID NO: 19685 - DNA, 23 bp, Homo sapiens
agcccgggtccaacaccagctgc

SEQ ID NO: 19686 - DNA, 23 bp, Homo sapiens
aagcccgggtccaacaccagctg

SEQ ID NO: 19687 - DNA, 23 bp, Homo sapiens
gaagcccgggtccaacaccagct

SEQ ID NO: 19688 - DNA, 23 bp, Homo sapiens
ggaagcccgggtccaacaccagc

SEQ ID NO: 19689 - DNA, 23 bp, Homo sapiens
aggaagcccgggtccaacaccag

SEQ ID NO: 19690 - DNA, 23 bp, Homo sapiens
caggaagcccgggtccaacacca

SEQ ID NO: 19691 - DNA, 23 bp, Homo sapiens
ccaggaagcccgggtccaacacc

SEQ ID NO: 19692 - DNA, 23 bp, Homo sapiens
cccaggaagcccgggtccaacac

SEQ ID NO: 19693 - DNA, 23 bp, Homo sapiens
ccccaggaagcccgggtccaaca

SEQ ID NO: 19694 - DNA, 23 bp, Homo sapiens
gccccaggaagcccgggtccaac

SEQ ID NO: 19695 - DNA, 23 bp, Homo sapiens
agccccaggaagcccgggtccaa

SEQ ID NO: 19696 - DNA, 23 bp, Homo sapiens
cagccccaggaagcccgggtcca

SEQ ID NO: 19697 - DNA, 23 bp, Homo sapiens
ccagccccaggaagcccgggtcc

SEQ ID NO: 19698 - DNA, 23 bp, Homo sapiens
tccagccccaggaagcccgggtc

SEQ ID NO: 19699 - DNA, 23 bp, Homo sapiens
ctccagccccaggaagcccgggt

SEQ ID NO: 19700 - DNA, 23 bp, Homo sapiens
gctccagccccaggaagcccggg

SEQ ID NO: 19701 - DNA, 23 bp, Homo sapiens
ggctccagccccaggaagcccgg

SEQ ID NO: 19702 - DNA, 23 bp, Homo sapiens
gggctccagccccaggaagcccg

SEQ ID NO: 19703 - DNA, 23 bp, Homo sapiens
ggggctccagccccaggaagccc

SEQ ID NO: 19704 - DNA, 23 bp, Homo sapiens
aggggctccagccccaggaagcc

SEQ ID NO: 19705 - DNA, 23 bp, Homo sapiens
caggggctccagccccaggaagc

SEQ ID NO: 19706 - DNA, 23 bp, Homo sapiens
gcaggggctccagccccaggaag

SEQ ID NO: 19707 - DNA, 23 bp, Homo sapiens
agcaggggctccagccccaggaa

SEQ ID NO: 19708 - DNA, 23 bp, Homo sapiens
gagcaggggctccagccccagga

SEQ ID NO: 19709 - DNA, 23 bp, Homo sapiens
cgagcaggggctccagccccagg

SEQ ID NO: 19710 - DNA, 23 bp, Homo sapiens
tcgagcaggggctccagccccag

SEQ ID NO: 19711 - DNA, 23 bp, Homo sapiens
gtcgagcaggggctccagcccca

SEQ ID NO: 19712 - DNA, 23 bp, Homo sapiens
ggtcgagcaggggctccagcccc

SEQ ID NO: 19713 - DNA, 23 bp, Homo sapiens
aggtcgagcaggggctccagccc

SEQ ID NO: 19714 - DNA, 23 bp, Homo sapiens
aaggtcgagcaggggctccagcc

SEQ ID NO: 19715 - DNA, 23 bp, Homo sapiens
gaaggtcgagcaggggctccagc

SEQ ID NO: 19716 - DNA, 23 bp, Homo sapiens
agaaggtcgagcaggggctccag

SEQ ID NO: 19717 - DNA, 23 bp, Homo sapiens
gagaaggtcgagcaggggctcca

SEQ ID NO: 19718 - DNA, 23 bp, Homo sapiens
ggagaaggtcgagcaggggctcc

SEQ ID NO: 19719 - DNA, 23 bp, Homo sapiens
aggagaaggtcgagcaggggctc

SEQ ID NO: 19720 - DNA, 23 bp, Homo sapiens
caggagaaggtcgagcaggggct

SEQ ID NO: 19721 - DNA, 23 bp, Homo sapiens
ccaggagaaggtcgagcaggggc

SEQ ID NO: 19722 - DNA, 23 bp, Homo sapiens
cccaggagaaggtcgagcagggg

SEQ ID NO: 19723 - DNA, 23 bp, Homo sapiens
gcccaggagaaggtcgagcaggg

SEQ ID NO: 19724 - DNA, 23 bp, Homo sapiens
cgcccaggagaaggtcgagcagg

SEQ ID NO: 19725 - DNA, 23 bp, Homo sapiens
acgcccaggagaaggtcgagcag

SEQ ID NO: 19726 - DNA, 23 bp, Homo sapiens
gacgcccaggagaaggtcgagca

SEQ ID NO: 19727 - DNA, 23 bp, Homo sapiens
ggacgcccaggagaaggtcgagc

SEQ ID NO: 19728 - DNA, 23 bp, Homo sapiens
tggacgcccaggagaaggtcgag

SEQ ID NO: 19729 - DNA, 23 bp, Homo sapiens
gtggacgcccaggagaaggtcga

SEQ ID NO: 19730 - DNA, 23 bp, Homo sapiens
ggtggacgcccaggagaaggtcg

SEQ ID NO: 19731 - DNA, 23 bp, Homo sapiens
tggtggacgcccaggagaaggtc

SEQ ID NO: 19732 - DNA, 23 bp, Homo sapiens
ctggtggacgcccaggagaaggt

SEQ ID NO: 19733 - DNA, 23 bp, Homo sapiens
cctggtggacgcccaggagaagg

SEQ ID NO: 19734 - DNA, 23 bp, Homo sapiens
tcctggtggacgcccaggagaag

SEQ ID NO: 19735 - DNA, 23 bp, Homo sapiens
ctcctggtggacgcccaggagaa

SEQ ID NO: 19736 - DNA, 23 bp, Homo sapiens
gctcctggtggacgcccaggaga

SEQ ID NO: 19737 - DNA, 23 bp, Homo sapiens
agctcctggtggacgcccaggag

SEQ ID NO: 19738 - DNA, 23 bp, Homo sapiens
cagctcctggtggacgcccagga

SEQ ID NO: 19739 - DNA, 23 bp, Homo sapiens
ccagctcctggtggacgcccagg

SEQ ID NO: 19740 - DNA, 23 bp, Homo sapiens
cccagctcctggtggacgcccag

SEQ ID NO: 19741 - DNA, 23 bp, Homo sapiens
gcccagctcctggtggacgccca

SEQ ID NO: 19742 - DNA, 23 bp, Homo sapiens
cgcccagctcctggtggacgccc

SEQ ID NO: 19743 - DNA, 23 bp, Homo sapiens
gcgcccagctcctggtggacgcc

SEQ ID NO: 19744 - DNA, 23 bp, Homo sapiens
ggcgcccagctcctggtggacgc

SEQ ID NO: 19745 - DNA, 23 bp, Homo sapiens
aggcgcccagctcctggtggacg

SEQ ID NO: 19746 - DNA, 23 bp, Homo sapiens
gaggcgcccagctcctggtggac

SEQ ID NO: 19747 - DNA, 23 bp, Homo sapiens
ggaggcgcccagctcctggtgga

SEQ ID NO: 19748 - DNA, 23 bp, Homo sapiens
cggaggcgcccagctcctggtgg

SEQ ID NO: 19749 - DNA, 23 bp, Homo sapiens
tcggaggcgcccagctcctggtg

SEQ ID NO: 19750 - DNA, 23 bp, Homo sapiens
ttcggaggcgcccagctcctggt

SEQ ID NO: 19751 - DNA, 23 bp, Homo sapiens
gttcggaggcgcccagctcctgg

SEQ ID NO: 19752 - DNA, 23 bp, Homo sapiens
agttcggaggcgcccagctcctg

SEQ ID NO: 19753 - DNA, 23 bp, Homo sapiens
cagttcggaggcgcccagctcct

SEQ ID NO: 19754 - DNA, 23 bp, Homo sapiens
ccagttcggaggcgcccagctcc

SEQ ID NO: 19755 - DNA, 23 bp, Homo sapiens
gccagttcggaggcgcccagctc

SEQ ID NO: 19756 - DNA, 23 bp, Homo sapiens
ggccagttcggaggcgcccagct

SEQ ID NO: 19757 - DNA, 23 bp, Homo sapiens
gggccagttcggaggcgcccagc

SEQ ID NO: 19758 - DNA, 23 bp, Homo sapiens
tgggccagttcggaggcgcccag

SEQ ID NO: 19759 - DNA, 23 bp, Homo sapiens
ctgggccagttcggaggcgccca

SEQ ID NO: 19760 - DNA, 23 bp, Homo sapiens
cctgggccagttcggaggcgccc

SEQ ID NO: 19761 - DNA, 23 bp, Homo sapiens
tcctgggccagttcggaggcgcc

SEQ ID NO: 19762 - DNA, 23 bp, Homo sapiens
gtcctgggccagttcggaggcgc

SEQ ID NO: 19763 - DNA, 23 bp, Homo sapiens
tgtcctgggccagttcggaggcg

SEQ ID NO: 19764 - DNA, 23 bp, Homo sapiens
ttgtcctgggccagttcggaggc

SEQ ID NO: 19765 - DNA, 23 bp, Homo sapiens
cttgtcctgggccagttcggagg

SEQ ID NO: 19766 - DNA, 23 bp, Homo sapiens
acttgtcctgggccagttcggag

SEQ ID NO: 19767 - DNA, 23 bp, Homo sapiens
tacttgtcctgggccagttcgga

SEQ ID NO: 19768 - DNA, 23 bp, Homo sapiens
gtacttgtcctgggccagttcgg

SEQ ID NO: 19769 - DNA, 23 bp, Homo sapiens
cgtacttgtcctgggccagttcg

SEQ ID NO: 19770 - DNA, 23 bp, Homo sapiens
acgtacttgtcctgggccagttc

SEQ ID NO: 19771 - DNA, 23 bp, Homo sapiens
cacgtacttgtcctgggccagtt

SEQ ID NO: 19772 - DNA, 23 bp, Homo sapiens
ccacgtacttgtcctgggccagt

SEQ ID NO: 19773 - DNA, 23 bp, Homo sapiens
gccacgtacttgtcctgggccag

SEQ ID NO: 19774 - DNA, 23 bp, Homo sapiens
ggccacgtacttgtcctgggcca

SEQ ID NO: 19775 - DNA, 23 bp, Homo sapiens
cggccacgtacttgtcctgggcc

SEQ ID NO: 19776 - DNA, 23 bp, Homo sapiens
tcggccacgtacttgtcctgggc

SEQ ID NO: 19777 - DNA, 23 bp, Homo sapiens
gtcggccacgtacttgtcctggg

SEQ ID NO: 19778 - DNA, 23 bp, Homo sapiens
agtcggccacgtacttgtcctgg

SEQ ID NO: 19779 - DNA, 23 bp, Homo sapiens
aagtcggccacgtacttgtcctg

SEQ ID NO: 19780 - DNA, 23 bp, Homo sapiens
gaagtcggccacgtacttgtcct

SEQ ID NO: 19781 - DNA, 23 bp, Homo sapiens
agaagtcggccacgtacttgtcc

SEQ ID NO: 19782 - DNA, 23 bp, Homo sapiens
aagaagtcggccacgtacttgtc

SEQ ID NO: 19783 - DNA, 23 bp, Homo sapiens
caagaagtcggccacgtacttgt

SEQ ID NO: 19784 - DNA, 23 bp, Homo sapiens
gcaagaagtcggccacgtacttg

SEQ ID NO: 19785 - DNA, 23 bp, Homo sapiens
tgcaagaagtcggccacgtactt

SEQ ID NO: 19786 - DNA, 23 bp, Homo sapiens
ctgcaagaagtcggccacgtact

SEQ ID NO: 19787 - DNA, 23 bp, Homo sapiens
actgcaagaagtcggccacgtac

SEQ ID NO: 19788 - DNA, 23 bp, Homo sapiens
cactgcaagaagtcggccacgta

SEQ ID NO: 19789 - DNA, 23 bp, Homo sapiens
ccactgcaagaagtcggccacgt

SEQ ID NO: 19790 - DNA, 23 bp, Homo sapiens
cccactgcaagaagtcggccacg

SEQ ID NO: 19791 - DNA, 23 bp, Homo sapiens
gcccactgcaagaagtcggccac

SEQ ID NO: 19792 - DNA, 23 bp, Homo sapiens
cgcccactgcaagaagtcggcca

SEQ ID NO: 19793 - DNA, 23 bp, Homo sapiens
ccgcccactgcaagaagtcggcc

SEQ ID NO: 19794 - DNA, 23 bp, Homo sapiens
tccgcccactgcaagaagtcggc

SEQ ID NO: 19795 - DNA, 23 bp, Homo sapiens
ctccgcccactgcaagaagtcgg

SEQ ID NO: 19796 - DNA, 23 bp, Homo sapiens
gctccgcccactgcaagaagtcg

SEQ ID NO: 19797 - DNA, 23 bp, Homo sapiens
ggctccgcccactgcaagaagtc

SEQ ID NO: 19798 - DNA, 23 bp, Homo sapiens
gggctccgcccactgcaagaagt

SEQ ID NO: 19799 - DNA, 23 bp, Homo sapiens
tgggctccgcccactgcaagaag

SEQ ID NO: 19800 - DNA, 23 bp, Homo sapiens
atgggctccgcccactgcaagaa

SEQ ID NO: 19801 - DNA, 23 bp, Homo sapiens
gatgggctccgcccactgcaaga

SEQ ID NO: 19802 - DNA, 23 bp, Homo sapiens
cgatgggctccgcccactgcaag

SEQ ID NO: 19803 - DNA, 23 bp, Homo sapiens
acgatgggctccgcccactgcaa

SEQ ID NO: 19804 - DNA, 23 bp, Homo sapiens
cacgatgggctccgcccactgca

SEQ ID NO: 19805 - DNA, 23 bp, Homo sapiens
ccacgatgggctccgcccactgc

SEQ ID NO: 19806 - DNA, 23 bp, Homo sapiens
accacgatgggctccgcccactg

SEQ ID NO: 19807 - DNA, 23 bp, Homo sapiens
caccacgatgggctccgcccact

SEQ ID NO: 19808 - DNA, 23 bp, Homo sapiens
tcaccacgatgggctccgcccac

SEQ ID NO: 19809 - DNA, 23 bp, Homo sapiens
ctcaccacgatgggctccgccca

SEQ ID NO: 19810 - DNA, 23 bp, Homo sapiens
cctcaccacgatgggctccgccc

SEQ ID NO: 19811 - DNA, 23 bp, Homo sapiens
gcctcaccacgatgggctccgcc

SEQ ID NO: 19812 - DNA, 23 bp, Homo sapiens
agcctcaccacgatgggctccgc

SEQ ID NO: 19813 - DNA, 23 bp, Homo sapiens
aagcctcaccacgatgggctccg

SEQ ID NO: 19814 - DNA, 23 bp, Homo sapiens
taagcctcaccacgatgggctcc

SEQ ID NO: 19815 - DNA, 23 bp, Homo sapiens
ttaagcctcaccacgatgggctc

SEQ ID NO: 19816 - DNA, 23 bp, Homo sapiens
cttaagcctcaccacgatgggct

SEQ ID NO: 19817 - DNA, 23 bp, Homo sapiens
ccttaagcctcaccacgatgggc

SEQ ID NO: 19818 - DNA, 23 bp, Homo sapiens
tccttaagcctcaccacgatggg

SEQ ID NO: 19819 - DNA, 23 bp, Homo sapiens
ctccttaagcctcaccacgatgg

SEQ ID NO: 19820 - DNA, 23 bp, Homo sapiens
cctccttaagcctcaccacgatg

SEQ ID NO: 19821 - DNA, 23 bp, Homo sapiens
acctccttaagcctcaccacgat

SEQ ID NO: 19822 - DNA, 23 bp, Homo sapiens
gacctccttaagcctcaccacga

SEQ ID NO: 19823 - DNA, 23 bp, Homo sapiens
ggacctccttaagcctcaccacg

SEQ ID NO: 19824 - DNA, 23 bp, Homo sapiens
cggacctccttaagcctcaccac

SEQ ID NO: 19825 - DNA, 23 bp, Homo sapiens
tcggacctccttaagcctcacca

SEQ ID NO: 19826 - DNA, 23 bp, Homo sapiens
gtcggacctccttaagcctcacc

SEQ ID NO: 19827 - DNA, 23 bp, Homo sapiens
agtcggacctccttaagcctcac

SEQ ID NO: 19828 - DNA, 23 bp, Homo sapiens
cagtcggacctccttaagcctca

SEQ ID NO: 19829 - DNA, 23 bp, Homo sapiens
gcagtcggacctccttaagcctc

SEQ ID NO: 19830 - DNA, 23 bp, Homo sapiens
tgcagtcggacctccttaagcct

SEQ ID NO: 19831 - DNA, 23 bp, Homo sapiens
ctgcagtcggacctccttaagcc

SEQ ID NO: 19832 - DNA, 23 bp, Homo sapiens
tctgcagtcggacctccttaagc

SEQ ID NO: 19833 - DNA, 23 bp, Homo sapiens
ctctgcagtcggacctccttaag

SEQ ID NO: 19834 - DNA, 23 bp, Homo sapiens
cctctgcagtcggacctccttaa

SEQ ID NO: 19835 - DNA, 23 bp, Homo sapiens
ccctctgcagtcggacctcctta

SEQ ID NO: 19836 - DNA, 23 bp, Homo sapiens
tccctctgcagtcggacctcctt

SEQ ID NO: 19837 - DNA, 23 bp, Homo sapiens
gtccctctgcagtcggacctcct

SEQ ID NO: 19838 - DNA, 23 bp, Homo sapiens
cgtccctctgcagtcggacctcc

SEQ ID NO: 19839 - DNA, 23 bp, Homo sapiens
tcgtccctctgcagtcggacctc

SEQ ID NO: 19840 - DNA, 23 bp, Homo sapiens
gtcgtccctctgcagtcggacct

SEQ ID NO: 19841 - DNA, 23 bp, Homo sapiens
agtcgtccctctgcagtcggacc

SEQ ID NO: 19842 - DNA, 23 bp, Homo sapiens
aagtcgtccctctgcagtcggac

SEQ ID NO: 19843 - DNA, 23 bp, Homo sapiens
gaagtcgtccctctgcagtcgga

SEQ ID NO: 19844 - DNA, 23 bp, Homo sapiens
cgaagtcgtccctctgcagtcgg

SEQ ID NO: 19845 - DNA, 23 bp, Homo sapiens
tcgaagtcgtccctctgcagtcg

SEQ ID NO: 19846 - DNA, 23 bp, Homo sapiens
ctcgaagtcgtccctctgcagtc

SEQ ID NO: 19847 - DNA, 23 bp, Homo sapiens
tctcgaagtcgtccctctgcagt

SEQ ID NO: 19848 - DNA, 23 bp, Homo sapiens
atctcgaagtcgtccctctgcag

SEQ ID NO: 19849 - DNA, 23 bp, Homo sapiens
aatctcgaagtcgtccctctgca

SEQ ID NO: 19850 - DNA, 23 bp, Homo sapiens
gaatctcgaagtcgtccctctgc

SEQ ID NO: 19851 - DNA, 23 bp, Homo sapiens
agaatctcgaagtcgtccctctg

SEQ ID NO: 19852 - DNA, 23 bp, Homo sapiens
cagaatctcgaagtcgtccctct

SEQ ID NO: 19853 - DNA, 23 bp, Homo sapiens
tcagaatctcgaagtcgtccctc

SEQ ID NO: 19854 - DNA, 23 bp, Homo sapiens
ttcagaatctcgaagtcgtccct

SEQ ID NO: 19855 - DNA, 23 bp, Homo sapiens
cttcagaatctcgaagtcgtccc

SEQ ID NO: 19856 - DNA, 23 bp, Homo sapiens
ccttcagaatctcgaagtcgtcc

SEQ ID NO: 19857 - DNA, 23 bp, Homo sapiens
accttcagaatctcgaagtcgtc

SEQ ID NO: 19858 - DNA, 23 bp, Homo sapiens
caccttcagaatctcgaagtcgt

SEQ ID NO: 19859 - DNA, 23 bp, Homo sapiens
tcaccttcagaatctcgaagtcg

SEQ ID NO: 19860 - DNA, 23 bp, Homo sapiens
atcaccttcagaatctcgaagtc

SEQ ID NO: 19861 - DNA, 23 bp, Homo sapiens
gatcaccttcagaatctcgaagt

SEQ ID NO: 19862 - DNA, 23 bp, Homo sapiens
cgatcaccttcagaatctcgaag

SEQ ID NO: 19863 - DNA, 23 bp, Homo sapiens
ccgatcaccttcagaatctcgaa

SEQ ID NO: 19864 - DNA, 23 bp, Homo sapiens
tccgatcaccttcagaatctcga

SEQ ID NO: 19865 - DNA, 23 bp, Homo sapiens
gtccgatcaccttcagaatctcg

SEQ ID NO: 19866 - DNA, 23 bp, Homo sapiens
cgtccgatcaccttcagaatctc

SEQ ID NO: 19867 - DNA, 23 bp, Homo sapiens
gcgtccgatcaccttcagaatct

SEQ ID NO: 19868 - DNA, 23 bp, Homo sapiens
cgcgtccgatcaccttcagaatc

SEQ ID NO: 19869 - DNA, 23 bp, Homo sapiens
ccgcgtccgatcaccttcagaat

SEQ ID NO: 19870 - DNA, 23 bp, Homo sapiens
cccgcgtccgatcaccttcagaa

SEQ ID NO: 19871 - DNA, 23 bp, Homo sapiens
ccccgcgtccgatcaccttcaga

SEQ ID NO: 19872 - DNA, 23 bp, Homo sapiens
gccccgcgtccgatcaccttcag

SEQ ID NO: 19873 - DNA, 23 bp, Homo sapiens
cgccccgcgtccgatcaccttca

SEQ ID NO: 19874 - DNA, 23 bp, Homo sapiens
acgccccgcgtccgatcaccttc

SEQ ID NO: 19875 - DNA, 23 bp, Homo sapiens
aacgccccgcgtccgatcacctt

SEQ ID NO: 19876 - DNA, 23 bp, Homo sapiens
gaacgccccgcgtccgatcacct

SEQ ID NO: 19877 - DNA, 23 bp, Homo sapiens
tgaacgccccgcgtccgatcacc

SEQ ID NO: 19878 - DNA, 23 bp, Homo sapiens
ctgaacgccccgcgtccgatcac

SEQ ID NO: 19879 - DNA, 23 bp, Homo sapiens
gctgaacgccccgcgtccgatca

SEQ ID NO: 19880 - DNA, 23 bp, Homo sapiens
cgctgaacgccccgcgtccgatc

SEQ ID NO: 19881 - DNA, 23 bp, Homo sapiens
tcgctgaacgccccgcgtccgat

SEQ ID NO: 19882 - DNA, 23 bp, Homo sapiens
ctcgctgaacgccccgcgtccga

SEQ ID NO: 19883 - DNA, 23 bp, Homo sapiens
cctcgctgaacgccccgcgtccg

SEQ ID NO: 19884 - DNA, 23 bp, Homo sapiens
acctcgctgaacgccccgcgtcc

SEQ ID NO: 19885 - DNA, 23 bp, Homo sapiens
tacctcgctgaacgccccgcgtc

SEQ ID NO: 19886 - DNA, 23 bp, Homo sapiens
ctacctcgctgaacgccccgcgt

SEQ ID NO: 19887 - DNA, 23 bp, Homo sapiens
gctacctcgctgaacgccccgcg

SEQ ID NO: 19888 - DNA, 23 bp, Homo sapiens
cgctacctcgctgaacgccccgc

SEQ ID NO: 19889 - DNA, 23 bp, Homo sapiens
ccgctacctcgctgaacgccccg

SEQ ID NO: 19890 - DNA, 23 bp, Homo sapiens
accgctacctcgctgaacgcccc

SEQ ID NO: 19891 - DNA, 23 bp, Homo sapiens
taccgctacctcgctgaacgccc

SEQ ID NO: 19892 - DNA, 23 bp, Homo sapiens
ctaccgctacctcgctgaacgcc

SEQ ID NO: 19893 - DNA, 23 bp, Homo sapiens
actaccgctacctcgctgaacgc

SEQ ID NO: 19894 - DNA, 23 bp, Homo sapiens
cactaccgctacctcgctgaacg

SEQ ID NO: 19895 - DNA, 23 bp, Homo sapiens
tcactaccgctacctcgctgaac

SEQ ID NO: 19896 - DNA, 23 bp, Homo sapiens
ttcactaccgctacctcgctgaa

SEQ ID NO: 19897 - DNA, 23 bp, Homo sapiens
cttcactaccgctacctcgctga

SEQ ID NO: 19898 - DNA, 23 bp, Homo sapiens
tcttcactaccgctacctcgctg

SEQ ID NO: 19899 - DNA, 23 bp, Homo sapiens
atcttcactaccgctacctcgct

SEQ ID NO: 19900 - DNA, 23 bp, Homo sapiens
catcttcactaccgctacctcgc

SEQ ID NO: 19901 - DNA, 23 bp, Homo sapiens
tcatcttcactaccgctacctcg

SEQ ID NO: 19902 - DNA, 23 bp, Homo sapiens
ttcatcttcactaccgctacctc

SEQ ID NO: 19903 - DNA, 23 bp, Homo sapiens
cttcatcttcactaccgctacct

SEQ ID NO: 19904 - DNA, 23 bp, Homo sapiens
gcttcatcttcactaccgctacc

SEQ ID NO: 19905 - DNA, 23 bp, Homo sapiens
tgcttcatcttcactaccgctac

SEQ ID NO: 19906 - DNA, 23 bp, Homo sapiens
ctgcttcatcttcactaccgcta

SEQ ID NO: 19907 - DNA, 23 bp, Homo sapiens
tctgcttcatcttcactaccgct

SEQ ID NO: 19908 - DNA, 23 bp, Homo sapiens
gtctgcttcatcttcactaccgc

SEQ ID NO: 19909 - DNA, 23 bp, Homo sapiens
cgtctgcttcatcttcactaccg

SEQ ID NO: 19910 - DNA, 23 bp, Homo sapiens
ccgtctgcttcatcttcactacc

SEQ ID NO: 19911 - DNA, 23 bp, Homo sapiens
cccgtctgcttcatcttcactac

SEQ ID NO: 19912 - DNA, 23 bp, Homo sapiens
gcccgtctgcttcatcttcacta

SEQ ID NO: 19913 - DNA, 23 bp, Homo sapiens
ggcccgtctgcttcatcttcact

SEQ ID NO: 19914 - DNA, 23 bp, Homo sapiens
tggcccgtctgcttcatcttcac

SEQ ID NO: 19915 - DNA, 23 bp, Homo sapiens
ctggcccgtctgcttcatcttca

SEQ ID NO: 19916 - DNA, 23 bp, Homo sapiens
cctggcccgtctgcttcatcttc

SEQ ID NO: 19917 - DNA, 23 bp, Homo sapiens
acctggcccgtctgcttcatctt

SEQ ID NO: 19918 - DNA, 23 bp, Homo sapiens
cacctggcccgtctgcttcatct

SEQ ID NO: 19919 - DNA, 23 bp, Homo sapiens
acacctggcccgtctgcttcatc

SEQ ID NO: 19920 - DNA, 23 bp, Homo sapiens
tacacctggcccgtctgcttcat

SEQ ID NO: 19921 - DNA, 23 bp, Homo sapiens
atacacctggcccgtctgcttca

SEQ ID NO: 19922 - DNA, 23 bp, Homo sapiens
catacacctggcccgtctgcttc

SEQ ID NO: 19923 - DNA, 23 bp, Homo sapiens
gcatacacctggcccgtctgctt

SEQ ID NO: 19924 - DNA, 23 bp, Homo sapiens
ggcatacacctggcccgtctgct

SEQ ID NO: 19925 - DNA, 23 bp, Homo sapiens
tggcatacacctggcccgtctgc

SEQ ID NO: 19926 - DNA, 23 bp, Homo sapiens
atggcatacacctggcccgtctg

SEQ ID NO: 19927 - DNA, 23 bp, Homo sapiens
catggcatacacctggcccgtct

SEQ ID NO: 19928 - DNA, 23 bp, Homo sapiens
tcatggcatacacctggcccgtc

SEQ ID NO: 19929 - DNA, 23 bp, Homo sapiens
ttcatggcatacacctggcccgt

SEQ ID NO: 19930 - DNA, 23 bp, Homo sapiens
cttcatggcatacacctggcccg

SEQ ID NO: 19931 - DNA, 23 bp, Homo sapiens
tcttcatggcatacacctggccc

SEQ ID NO: 19932 - DNA, 23 bp, Homo sapiens
atcttcatggcatacacctggcc

SEQ ID NO: 19933 - DNA, 23 bp, Homo sapiens
gatcttcatggcatacacctggc

SEQ ID NO: 19934 - DNA, 23 bp, Homo sapiens
tgatcttcatggcatacacctgg

SEQ ID NO: 19935 - DNA, 23 bp, Homo sapiens
atgatcttcatggcatacacctg

SEQ ID NO: 19936 - DNA, 23 bp, Homo sapiens
catgatcttcatggcatacacct

SEQ ID NO: 19937 - DNA, 23 bp, Homo sapiens
tcatgatcttcatggcatacacc

SEQ ID NO: 19938 - DNA, 23 bp, Homo sapiens
ttcatgatcttcatggcatacac

SEQ ID NO: 19939 - DNA, 23 bp, Homo sapiens
gttcatgatcttcatggcataca

SEQ ID NO: 19940 - DNA, 23 bp, Homo sapiens
tgttcatgatcttcatggcatac

SEQ ID NO: 19941 - DNA, 23 bp, Homo sapiens
ttgttcatgatcttcatggcata

SEQ ID NO: 19942 - DNA, 23 bp, Homo sapiens
cttgttcatgatcttcatggcat

SEQ ID NO: 19943 - DNA, 23 bp, Homo sapiens
acttgttcatgatcttcatggca

SEQ ID NO: 19944 - DNA, 23 bp, Homo sapiens
cacttgttcatgatcttcatggc

SEQ ID NO: 19945 - DNA, 23 bp, Homo sapiens
ccacttgttcatgatcttcatgg

SEQ ID NO: 19946 - DNA, 23 bp, Homo sapiens
cccacttgttcatgatcttcatg

SEQ ID NO: 19947 - DNA, 23 bp, Homo sapiens
tcccacttgttcatgatcttcat

SEQ ID NO: 19948 - DNA, 23 bp, Homo sapiens
gtcccacttgttcatgatcttca

SEQ ID NO: 19949 - DNA, 23 bp, Homo sapiens
tgtcccacttgttcatgatcttc

SEQ ID NO: 19950 - DNA, 23 bp, Homo sapiens
atgtcccacttgttcatgatctt

SEQ ID NO: 19951 - DNA, 23 bp, Homo sapiens
catgtcccacttgttcatgatct

SEQ ID NO: 19952 - DNA, 23 bp, Homo sapiens
gcatgtcccacttgttcatgatc

SEQ ID NO: 19953 - DNA, 23 bp, Homo sapiens
agcatgtcccacttgttcatgat

SEQ ID NO: 19954 - DNA, 23 bp, Homo sapiens
cagcatgtcccacttgttcatga

SEQ ID NO: 19955 - DNA, 23 bp, Homo sapiens
tcagcatgtcccacttgttcatg

SEQ ID NO: 19956 - DNA, 23 bp, Homo sapiens
ttcagcatgtcccacttgttcat

SEQ ID NO: 19957 - DNA, 23 bp, Homo sapiens
cttcagcatgtcccacttgttca

SEQ ID NO: 19958 - DNA, 23 bp, Homo sapiens
tcttcagcatgtcccacttgttc

SEQ ID NO: 19959 - DNA, 23 bp, Homo sapiens
ctcttcagcatgtcccacttgtt

SEQ ID NO: 19960 - DNA, 23 bp, Homo sapiens
cctcttcagcatgtcccacttgt

SEQ ID NO: 19961 - DNA, 23 bp, Homo sapiens
ccctcttcagcatgtcccacttg

SEQ ID NO: 19962 - DNA, 23 bp, Homo sapiens
cccctcttcagcatgtcccactt

SEQ ID NO: 19963 - DNA, 23 bp, Homo sapiens
gcccctcttcagcatgtcccact

SEQ ID NO: 19964 - DNA, 23 bp, Homo sapiens
cgcccctcttcagcatgtcccac

SEQ ID NO: 19965 - DNA, 23 bp, Homo sapiens
tcgcccctcttcagcatgtccca

SEQ ID NO: 19966 - DNA, 23 bp, Homo sapiens
ctcgcccctcttcagcatgtccc

SEQ ID NO: 19967 - DNA, 23 bp, Homo sapiens
cctcgcccctcttcagcatgtcc

SEQ ID NO: 19968 - DNA, 23 bp, Homo sapiens
acctcgcccctcttcagcatgtc

SEQ ID NO: 19969 - DNA, 23 bp, Homo sapiens
cacctcgcccctcttcagcatgt

SEQ ID NO: 19970 - DNA, 23 bp, Homo sapiens
acacctcgcccctcttcagcatg

SEQ ID NO: 19971 - DNA, 23 bp, Homo sapiens
gacacctcgcccctcttcagcat

SEQ ID NO: 19972 - DNA, 23 bp, Homo sapiens
cgacacctcgcccctcttcagca

SEQ ID NO: 19973 - DNA, 23 bp, Homo sapiens
acgacacctcgcccctcttcagc

SEQ ID NO: 19974 - DNA, 23 bp, Homo sapiens
cacgacacctcgcccctcttcag

SEQ ID NO: 19975 - DNA, 23 bp, Homo sapiens
gcacgacacctcgcccctcttca

SEQ ID NO: 19976 - DNA, 23 bp, Homo sapiens
agcacgacacctcgcccctcttc

SEQ ID NO: 19977 - DNA, 23 bp, Homo sapiens
aagcacgacacctcgcccctctt

SEQ ID NO: 19978 - DNA, 23 bp, Homo sapiens
gaagcacgacacctcgcccctct

SEQ ID NO: 19979 - DNA, 23 bp, Homo sapiens
ggaagcacgacacctcgcccctc

SEQ ID NO: 19980 - DNA, 23 bp, Homo sapiens
cggaagcacgacacctcgcccct

SEQ ID NO: 19981 - DNA, 23 bp, Homo sapiens
acggaagcacgacacctcgcccc

SEQ ID NO: 19982 - DNA, 23 bp, Homo sapiens
cacggaagcacgacacctcgccc

SEQ ID NO: 19983 - DNA, 23 bp, Homo sapiens
tcacggaagcacgacacctcgcc

SEQ ID NO: 19984 - DNA, 23 bp, Homo sapiens
ctcacggaagcacgacacctcgc

SEQ ID NO: 19985 - DNA, 23 bp, Homo sapiens
cctcacggaagcacgacacctcg

SEQ ID NO: 19986 - DNA, 23 bp, Homo sapiens
tcctcacggaagcacgacacctc

SEQ ID NO: 19987 - DNA, 23 bp, Homo sapiens
ctcctcacggaagcacgacacct

SEQ ID NO: 19988 - DNA, 23 bp, Homo sapiens
tctcctcacggaagcacgacacc

SEQ ID NO: 19989 - DNA, 23 bp, Homo sapiens
ctctcctcacggaagcacgacac

SEQ ID NO: 19990 - DNA, 23 bp, Homo sapiens
cctctcctcacggaagcacgaca

SEQ ID NO: 19991 - DNA, 23 bp, Homo sapiens
ccctctcctcacggaagcacgac

SEQ ID NO: 19992 - DNA, 23 bp, Homo sapiens
tccctctcctcacggaagcacga

SEQ ID NO: 19993 - DNA, 23 bp, Homo sapiens
gtccctctcctcacggaagcacg

SEQ ID NO: 19994 - DNA, 23 bp, Homo sapiens
cgtccctctcctcacggaagcac

SEQ ID NO: 19995 - DNA, 23 bp, Homo sapiens
acgtccctctcctcacggaagca

SEQ ID NO: 19996 - DNA, 23 bp, Homo sapiens
cacgtccctctcctcacggaagc

SEQ ID NO: 19997 - DNA, 23 bp, Homo sapiens
acacgtccctctcctcacggaag

SEQ ID NO: 19998 - DNA, 23 bp, Homo sapiens
aacacgtccctctcctcacggaa

SEQ ID NO: 19999 - DNA, 23 bp, Homo sapiens
caacacgtccctctcctcacgga

SEQ ID NO: 20000 - DNA, 23 bp, Homo sapiens
ccaacacgtccctctcctcacgg

SEQ ID NO: 20001 - DNA, 23 bp, Homo sapiens
accaacacgtccctctcctcacg

SEQ ID NO: 20002 - DNA, 23 bp, Homo sapiens
caccaacacgtccctctcctcac

SEQ ID NO: 20003 - DNA, 23 bp, Homo sapiens
tcaccaacacgtccctctcctca

SEQ ID NO: 20004 - DNA, 23 bp, Homo sapiens
ttcaccaacacgtccctctcctc

SEQ ID NO: 20005 - DNA, 23 bp, Homo sapiens
attcaccaacacgtccctctcct

SEQ ID NO: 20006 - DNA, 23 bp, Homo sapiens
cattcaccaacacgtccctctcc

SEQ ID NO: 20007 - DNA, 23 bp, Homo sapiens
ccattcaccaacacgtccctctc

SEQ ID NO: 20008 - DNA, 23 bp, Homo sapiens
cccattcaccaacacgtccctct

SEQ ID NO: 20009 - DNA, 23 bp, Homo sapiens
ccccattcaccaacacgtccctc

SEQ ID NO: 20010 - DNA, 23 bp, Homo sapiens
tccccattcaccaacacgtccct

SEQ ID NO: 20011 - DNA, 23 bp, Homo sapiens
gtccccattcaccaacacgtccc

SEQ ID NO: 20012 - DNA, 23 bp, Homo sapiens
ggtccccattcaccaacacgtcc

SEQ ID NO: 20013 - DNA, 23 bp, Homo sapiens
cggtccccattcaccaacacgtc

SEQ ID NO: 20014 - DNA, 23 bp, Homo sapiens
ccggtccccattcaccaacacgt

SEQ ID NO: 20015 - DNA, 23 bp, Homo sapiens
gccggtccccattcaccaacacg

SEQ ID NO: 20016 - DNA, 23 bp, Homo sapiens
cgccggtccccattcaccaacac

SEQ ID NO: 20017 - DNA, 23 bp, Homo sapiens
ccgccggtccccattcaccaaca

SEQ ID NO: 20018 - DNA, 23 bp, Homo sapiens
accgccggtccccattcaccaac

SEQ ID NO: 20019 - DNA, 23 bp, Homo sapiens
caccgccggtccccattcaccaa

SEQ ID NO: 20020 - DNA, 23 bp, Homo sapiens
ccaccgccggtccccattcacca

SEQ ID NO: 20021 - DNA, 23 bp, Homo sapiens
tccaccgccggtccccattcacc

SEQ ID NO: 20022 - DNA, 23 bp, Homo sapiens
atccaccgccggtccccattcac

SEQ ID NO: 20023 - DNA, 23 bp, Homo sapiens
gatccaccgccggtccccattca

SEQ ID NO: 20024 - DNA, 23 bp, Homo sapiens
tgatccaccgccggtccccattc

SEQ ID NO: 20025 - DNA, 23 bp, Homo sapiens
gtgatccaccgccggtccccatt

SEQ ID NO: 20026 - DNA, 23 bp, Homo sapiens
cgtgatccaccgccggtccccat

SEQ ID NO: 20027 - DNA, 23 bp, Homo sapiens
gcgtgatccaccgccggtcccca

SEQ ID NO: 20028 - DNA, 23 bp, Homo sapiens
tgcgtgatccaccgccggtcccc

SEQ ID NO: 20029 - DNA, 23 bp, Homo sapiens
ctgcgtgatccaccgccggtccc

SEQ ID NO: 20030 - DNA, 23 bp, Homo sapiens
gctgcgtgatccaccgccggtcc

SEQ ID NO: 20031 - DNA, 23 bp, Homo sapiens
agctgcgtgatccaccgccggtc

SEQ ID NO: 20032 - DNA, 23 bp, Homo sapiens
cagctgcgtgatccaccgccggt

SEQ ID NO: 20033 - DNA, 23 bp, Homo sapiens
gcagctgcgtgatccaccgccgg

SEQ ID NO: 20034 - DNA, 23 bp, Homo sapiens
tgcagctgcgtgatccaccgccg

SEQ ID NO: 20035 - DNA, 23 bp, Homo sapiens
gtgcagctgcgtgatccaccgcc

SEQ ID NO: 20036 - DNA, 23 bp, Homo sapiens
agtgcagctgcgtgatccaccgc

SEQ ID NO: 20037 - DNA, 23 bp, Homo sapiens
aagtgcagctgcgtgatccaccg

SEQ ID NO: 20038 - DNA, 23 bp, Homo sapiens
gaagtgcagctgcgtgatccacc

SEQ ID NO: 20039 - DNA, 23 bp, Homo sapiens
cgaagtgcagctgcgtgatccac

SEQ ID NO: 20040 - DNA, 23 bp, Homo sapiens
gcgaagtgcagctgcgtgatcca

SEQ ID NO: 20041 - DNA, 23 bp, Homo sapiens
ggcgaagtgcagctgcgtgatcc

SEQ ID NO: 20042 - DNA, 23 bp, Homo sapiens
aggcgaagtgcagctgcgtgatc

SEQ ID NO: 20043 - DNA, 23 bp, Homo sapiens
aaggcgaagtgcagctgcgtgat

SEQ ID NO: 20044 - DNA, 23 bp, Homo sapiens
gaaggcgaagtgcagctgcgtga

SEQ ID NO: 20045 - DNA, 23 bp, Homo sapiens
ggaaggcgaagtgcagctgcgtg

SEQ ID NO: 20046 - DNA, 23 bp, Homo sapiens
tggaaggcgaagtgcagctgcgt

SEQ ID NO: 20047 - DNA, 23 bp, Homo sapiens
ctggaaggcgaagtgcagctgcg

SEQ ID NO: 20048 - DNA, 23 bp, Homo sapiens
cctggaaggcgaagtgcagctgc

SEQ ID NO: 20049 - DNA, 23 bp, Homo sapiens
tcctggaaggcgaagtgcagctg

SEQ ID NO: 20050 - DNA, 23 bp, Homo sapiens
atcctggaaggcgaagtgcagct

SEQ ID NO: 20051 - DNA, 23 bp, Homo sapiens
catcctggaaggcgaagtgcagc

SEQ ID NO: 20052 - DNA, 23 bp, Homo sapiens
tcatcctggaaggcgaagtgcag

SEQ ID NO: 20053 - DNA, 23 bp, Homo sapiens
ctcatcctggaaggcgaagtgca

SEQ ID NO: 20054 - DNA, 23 bp, Homo sapiens
tctcatcctggaaggcgaagtgc

SEQ ID NO: 20055 - DNA, 23 bp, Homo sapiens
ttctcatcctggaaggcgaagtg

SEQ ID NO: 20056 - DNA, 23 bp, Homo sapiens
gttctcatcctggaaggcgaagt

SEQ ID NO: 20057 - DNA, 23 bp, Homo sapiens
agttctcatcctggaaggcgaag

SEQ ID NO: 20058 - DNA, 23 bp, Homo sapiens
tagttctcatcctggaaggcgaa

SEQ ID NO: 20059 - DNA, 23 bp, Homo sapiens
gtagttctcatcctggaaggcga

SEQ ID NO: 20060 - DNA, 23 bp, Homo sapiens
ggtagttctcatcctggaaggcg

SEQ ID NO: 20061 - DNA, 23 bp, Homo sapiens
aggtagttctcatcctggaaggc

SEQ ID NO: 20062 - DNA, 23 bp, Homo sapiens
caggtagttctcatcctggaagg

SEQ ID NO: 20063 - DNA, 23 bp, Homo sapiens
acaggtagttctcatcctggaag

SEQ ID NO: 20064 - DNA, 23 bp, Homo sapiens
tacaggtagttctcatcctggaa

SEQ ID NO: 20065 - DNA, 23 bp, Homo sapiens
gtacaggtagttctcatcctgga

SEQ ID NO: 20066 - DNA, 23 bp, Homo sapiens
ggtacaggtagttctcatcctgg

SEQ ID NO: 20067 - DNA, 23 bp, Homo sapiens
aggtacaggtagttctcatcctg

SEQ ID NO: 20068 - DNA, 23 bp, Homo sapiens
caggtacaggtagttctcatcct

SEQ ID NO: 20069 - DNA, 23 bp, Homo sapiens
ccaggtacaggtagttctcatcc

SEQ ID NO: 20070 - DNA, 23 bp, Homo sapiens
accaggtacaggtagttctcatc

SEQ ID NO: 20071 - DNA, 23 bp, Homo sapiens
gaccaggtacaggtagttctcat

SEQ ID NO: 20072 - DNA, 23 bp, Homo sapiens
tgaccaggtacaggtagttctca

SEQ ID NO: 20073 - DNA, 23 bp, Homo sapiens
atgaccaggtacaggtagttctc

SEQ ID NO: 20074 - DNA, 23 bp, Homo sapiens
catgaccaggtacaggtagttct

SEQ ID NO: 20075 - DNA, 23 bp, Homo sapiens
ccatgaccaggtacaggtagttc

SEQ ID NO: 20076 - DNA, 23 bp, Homo sapiens
tccatgaccaggtacaggtagtt

SEQ ID NO: 20077 - DNA, 23 bp, Homo sapiens
ctccatgaccaggtacaggtagt

SEQ ID NO: 20078 - DNA, 23 bp, Homo sapiens
actccatgaccaggtacaggtag

SEQ ID NO: 20079 - DNA, 23 bp, Homo sapiens
tactccatgaccaggtacaggta

SEQ ID NO: 20080 - DNA, 23 bp, Homo sapiens
atactccatgaccaggtacaggt

SEQ ID NO: 20081 - DNA, 23 bp, Homo sapiens
aatactccatgaccaggtacagg

SEQ ID NO: 20082 - DNA, 23 bp, Homo sapiens
taatactccatgaccaggtacag

SEQ ID NO: 20083 - DNA, 23 bp, Homo sapiens
gtaatactccatgaccaggtaca

SEQ ID NO: 20084 - DNA, 23 bp, Homo sapiens
cgtaatactccatgaccaggtac

SEQ ID NO: 20085 - DNA, 23 bp, Homo sapiens
acgtaatactccatgaccaggta

SEQ ID NO: 20086 - DNA, 23 bp, Homo sapiens
cacgtaatactccatgaccaggt

SEQ ID NO: 20087 - DNA, 23 bp, Homo sapiens
ccacgtaatactccatgaccagg

SEQ ID NO: 20088 - DNA, 23 bp, Homo sapiens
cccacgtaatactccatgaccag

SEQ ID NO: 20089 - DNA, 23 bp, Homo sapiens
gcccacgtaatactccatgacca

SEQ ID NO: 20090 - DNA, 23 bp, Homo sapiens
cgcccacgtaatactccatgacc

SEQ ID NO: 20091 - DNA, 23 bp, Homo sapiens
ccgcccacgtaatactccatgac

SEQ ID NO: 20092 - DNA, 23 bp, Homo sapiens
cccgcccacgtaatactccatga

SEQ ID NO: 20093 - DNA, 23 bp, Homo sapiens
ccccgcccacgtaatactccatg

SEQ ID NO: 20094 - DNA, 23 bp, Homo sapiens
tccccgcccacgtaatactccat

SEQ ID NO: 20095 - DNA, 23 bp, Homo sapiens
gtccccgcccacgtaatactcca

SEQ ID NO: 20096 - DNA, 23 bp, Homo sapiens
ggtccccgcccacgtaatactcc

SEQ ID NO: 20097 - DNA, 23 bp, Homo sapiens
aggtccccgcccacgtaatactc

SEQ ID NO: 20098 - DNA, 23 bp, Homo sapiens
caggtccccgcccacgtaatact

SEQ ID NO: 20099 - DNA, 23 bp, Homo sapiens
gcaggtccccgcccacgtaatac

SEQ ID NO: 20100 - DNA, 23 bp, Homo sapiens
agcaggtccccgcccacgtaata

SEQ ID NO: 20101 - DNA, 23 bp, Homo sapiens
cagcaggtccccgcccacgtaat

SEQ ID NO: 20102 - DNA, 23 bp, Homo sapiens
tcagcaggtccccgcccacgtaa

SEQ ID NO: 20103 - DNA, 23 bp, Homo sapiens
gtcagcaggtccccgcccacgta

SEQ ID NO: 20104 - DNA, 23 bp, Homo sapiens
tgtcagcaggtccccgcccacgt

SEQ ID NO: 20105 - DNA, 23 bp, Homo sapiens
gtgtcagcaggtccccgcccacg

SEQ ID NO: 20106 - DNA, 23 bp, Homo sapiens
agtgtcagcaggtccccgcccac

SEQ ID NO: 20107 - DNA, 23 bp, Homo sapiens
cagtgtcagcaggtccccgccca

SEQ ID NO: 20108 - DNA, 23 bp, Homo sapiens
gcagtgtcagcaggtccccgccc

SEQ ID NO: 20109 - DNA, 23 bp, Homo sapiens
agcagtgtcagcaggtccccgcc

SEQ ID NO: 20110 - DNA, 23 bp, Homo sapiens
cagcagtgtcagcaggtccccgc

SEQ ID NO: 20111 - DNA, 23 bp, Homo sapiens
tcagcagtgtcagcaggtccccg

SEQ ID NO: 20112 - DNA, 23 bp, Homo sapiens
ctcagcagtgtcagcaggtcccc

SEQ ID NO: 20113 - DNA, 23 bp, Homo sapiens
gctcagcagtgtcagcaggtccc

SEQ ID NO: 20114 - DNA, 23 bp, Homo sapiens
tgctcagcagtgtcagcaggtcc

SEQ ID NO: 20115 - DNA, 23 bp, Homo sapiens
ttgctcagcagtgtcagcaggtc

SEQ ID NO: 20116 - DNA, 23 bp, Homo sapiens
cttgctcagcagtgtcagcaggt

SEQ ID NO: 20117 - DNA, 23 bp, Homo sapiens
acttgctcagcagtgtcagcagg

SEQ ID NO: 20118 - DNA, 23 bp, Homo sapiens
aacttgctcagcagtgtcagcag

SEQ ID NO: 20119 - DNA, 23 bp, Homo sapiens
aaacttgctcagcagtgtcagca

SEQ ID NO: 20120 - DNA, 23 bp, Homo sapiens
caaacttgctcagcagtgtcagc

SEQ ID NO: 20121 - DNA, 23 bp, Homo sapiens
ccaaacttgctcagcagtgtcag

SEQ ID NO: 20122 - DNA, 23 bp, Homo sapiens
cccaaacttgctcagcagtgtca

SEQ ID NO: 20123 - DNA, 23 bp, Homo sapiens
ccccaaacttgctcagcagtgtc

SEQ ID NO: 20124 - DNA, 23 bp, Homo sapiens
tccccaaacttgctcagcagtgt

SEQ ID NO: 20125 - DNA, 23 bp, Homo sapiens
ctccccaaacttgctcagcagtg

SEQ ID NO: 20126 - DNA, 23 bp, Homo sapiens
gctccccaaacttgctcagcagt

SEQ ID NO: 20127 - DNA, 23 bp, Homo sapiens
cgctccccaaacttgctcagcag

SEQ ID NO: 20128 - DNA, 23 bp, Homo sapiens
ccgctccccaaacttgctcagca

SEQ ID NO: 20129 - DNA, 23 bp, Homo sapiens
tccgctccccaaacttgctcagc

SEQ ID NO: 20130 - DNA, 23 bp, Homo sapiens
atccgctccccaaacttgctcag

SEQ ID NO: 20131 - DNA, 23 bp, Homo sapiens
aatccgctccccaaacttgctca

SEQ ID NO: 20132 - DNA, 23 bp, Homo sapiens
gaatccgctccccaaacttgctc

SEQ ID NO: 20133 - DNA, 23 bp, Homo sapiens
ggaatccgctccccaaacttgct

SEQ ID NO: 20134 - DNA, 23 bp, Homo sapiens
cggaatccgctccccaaacttgc

SEQ ID NO: 20135 - DNA, 23 bp, Homo sapiens
ccggaatccgctccccaaacttg

SEQ ID NO: 20136 - DNA, 23 bp, Homo sapiens
gccggaatccgctccccaaactt

SEQ ID NO: 20137 - DNA, 23 bp, Homo sapiens
ggccggaatccgctccccaaact

SEQ ID NO: 20138 - DNA, 23 bp, Homo sapiens
cggccggaatccgctccccaaac

SEQ ID NO: 20139 - DNA, 23 bp, Homo sapiens
tcggccggaatccgctccccaaa

SEQ ID NO: 20140 - DNA, 23 bp, Homo sapiens
ctcggccggaatccgctccccaa

SEQ ID NO: 20141 - DNA, 23 bp, Homo sapiens
tctcggccggaatccgctcccca

SEQ ID NO: 20142 - DNA, 23 bp, Homo sapiens
atctcggccggaatccgctcccc

SEQ ID NO: 20143 - DNA, 23 bp, Homo sapiens
catctcggccggaatccgctccc

SEQ ID NO: 20144 - DNA, 23 bp, Homo sapiens
ccatctcggccggaatccgctcc

SEQ ID NO: 20145 - DNA, 23 bp, Homo sapiens
gccatctcggccggaatccgctc

SEQ ID NO: 20146 - DNA, 23 bp, Homo sapiens
cgccatctcggccggaatccgct

SEQ ID NO: 20147 - DNA, 23 bp, Homo sapiens
gcgccatctcggccggaatccgc

SEQ ID NO: 20148 - DNA, 23 bp, Homo sapiens
cgcgccatctcggccggaatccg

SEQ ID NO: 20149 - DNA, 23 bp, Homo sapiens
gcgcgccatctcggccggaatcc

SEQ ID NO: 20150 - DNA, 23 bp, Homo sapiens
agcgcgccatctcggccggaatc

SEQ ID NO: 20151 - DNA, 23 bp, Homo sapiens
aagcgcgccatctcggccggaat

SEQ ID NO: 20152 - DNA, 23 bp, Homo sapiens
gaagcgcgccatctcggccggaa

SEQ ID NO: 20153 - DNA, 23 bp, Homo sapiens
agaagcgcgccatctcggccgga

SEQ ID NO: 20154 - DNA, 23 bp, Homo sapiens
tagaagcgcgccatctcggccgg

SEQ ID NO: 20155 - DNA, 23 bp, Homo sapiens
gtagaagcgcgccatctcggccg

SEQ ID NO: 20156 - DNA, 23 bp, Homo sapiens
ggtagaagcgcgccatctcggcc

SEQ ID NO: 20157 - DNA, 23 bp, Homo sapiens
aggtagaagcgcgccatctcggc

SEQ ID NO: 20158 - DNA, 23 bp, Homo sapiens
caggtagaagcgcgccatctcgg

SEQ ID NO: 20159 - DNA, 23 bp, Homo sapiens
ccaggtagaagcgcgccatctcg

SEQ ID NO: 20160 - DNA, 23 bp, Homo sapiens
gccaggtagaagcgcgccatctc

SEQ ID NO: 20161 - DNA, 23 bp, Homo sapiens
cgccaggtagaagcgcgccatct

SEQ ID NO: 20162 - DNA, 23 bp, Homo sapiens
ccgccaggtagaagcgcgccatc

SEQ ID NO: 20163 - DNA, 23 bp, Homo sapiens
tccgccaggtagaagcgcgccat

SEQ ID NO: 20164 - DNA, 23 bp, Homo sapiens
ctccgccaggtagaagcgcgcca

SEQ ID NO: 20165 - DNA, 23 bp, Homo sapiens
tctccgccaggtagaagcgcgcc

SEQ ID NO: 20166 - DNA, 23 bp, Homo sapiens
atctccgccaggtagaagcgcgc

SEQ ID NO: 20167 - DNA, 23 bp, Homo sapiens
aatctccgccaggtagaagcgcg

SEQ ID NO: 20168 - DNA, 23 bp, Homo sapiens
caatctccgccaggtagaagcgc

SEQ ID NO: 20169 - DNA, 23 bp, Homo sapiens
acaatctccgccaggtagaagcg

SEQ ID NO: 20170 - DNA, 23 bp, Homo sapiens
gacaatctccgccaggtagaagc

SEQ ID NO: 20171 - DNA, 23 bp, Homo sapiens
tgacaatctccgccaggtagaag

SEQ ID NO: 20172 - DNA, 23 bp, Homo sapiens
atgacaatctccgccaggtagaa

SEQ ID NO: 20173 - DNA, 23 bp, Homo sapiens
catgacaatctccgccaggtaga

SEQ ID NO: 20174 - DNA, 23 bp, Homo sapiens
ccatgacaatctccgccaggtag

SEQ ID NO: 20175 - DNA, 23 bp, Homo sapiens
gccatgacaatctccgccaggta

SEQ ID NO: 20176 - DNA, 23 bp, Homo sapiens
ggccatgacaatctccgccaggt

SEQ ID NO: 20177 - DNA, 23 bp, Homo sapiens
tggccatgacaatctccgccagg

SEQ ID NO: 20178 - DNA, 23 bp, Homo sapiens
atggccatgacaatctccgccag

SEQ ID NO: 20179 - DNA, 23 bp, Homo sapiens
tatggccatgacaatctccgcca

SEQ ID NO: 20180 - DNA, 23 bp, Homo sapiens
ctatggccatgacaatctccgcc

SEQ ID NO: 20181 - DNA, 23 bp, Homo sapiens
tctatggccatgacaatctccgc

SEQ ID NO: 20182 - DNA, 23 bp, Homo sapiens
gtctatggccatgacaatctccg

SEQ ID NO: 20183 - DNA, 23 bp, Homo sapiens
agtctatggccatgacaatctcc

SEQ ID NO: 20184 - DNA, 23 bp, Homo sapiens
gagtctatggccatgacaatctc

SEQ ID NO: 20185 - DNA, 23 bp, Homo sapiens
cgagtctatggccatgacaatct

SEQ ID NO: 20186 - DNA, 23 bp, Homo sapiens
ccgagtctatggccatgacaatc

SEQ ID NO: 20187 - DNA, 23 bp, Homo sapiens
accgagtctatggccatgacaat

SEQ ID NO: 20188 - DNA, 23 bp, Homo sapiens
caccgagtctatggccatgacaa

SEQ ID NO: 20189 - DNA, 23 bp, Homo sapiens
gcaccgagtctatggccatgaca

SEQ ID NO: 20190 - DNA, 23 bp, Homo sapiens
tgcaccgagtctatggccatgac

SEQ ID NO: 20191 - DNA, 23 bp, Homo sapiens
gtgcaccgagtctatggccatga

SEQ ID NO: 20192 - DNA, 23 bp, Homo sapiens
ggtgcaccgagtctatggccatg

SEQ ID NO: 20193 - DNA, 23 bp, Homo sapiens
cggtgcaccgagtctatggccat

SEQ ID NO: 20194 - DNA, 23 bp, Homo sapiens
ccggtgcaccgagtctatggcca

SEQ ID NO: 20195 - DNA, 23 bp, Homo sapiens
gccggtgcaccgagtctatggcc

SEQ ID NO: 20196 - DNA, 23 bp, Homo sapiens
agccggtgcaccgagtctatggc

SEQ ID NO: 20197 - DNA, 23 bp, Homo sapiens
aagccggtgcaccgagtctatgg

SEQ ID NO: 20198 - DNA, 23 bp, Homo sapiens
caagccggtgcaccgagtctatg

SEQ ID NO: 20199 - DNA, 23 bp, Homo sapiens
ccaagccggtgcaccgagtctat

SEQ ID NO: 20200 - DNA, 23 bp, Homo sapiens
gccaagccggtgcaccgagtcta

SEQ ID NO: 20201 - DNA, 23 bp, Homo sapiens
agccaagccggtgcaccgagtct

SEQ ID NO: 20202 - DNA, 23 bp, Homo sapiens
tagccaagccggtgcaccgagtc

SEQ ID NO: 20203 - DNA, 23 bp, Homo sapiens
gtagccaagccggtgcaccgagt

SEQ ID NO: 20204 - DNA, 23 bp, Homo sapiens
cgtagccaagccggtgcaccgag

SEQ ID NO: 20205 - DNA, 23 bp, Homo sapiens
acgtagccaagccggtgcaccga

SEQ ID NO: 20206 - DNA, 23 bp, Homo sapiens
cacgtagccaagccggtgcaccg

SEQ ID NO: 20207 - DNA, 23 bp, Homo sapiens
gcacgtagccaagccggtgcacc

SEQ ID NO: 20208 - DNA, 23 bp, Homo sapiens
tgcacgtagccaagccggtgcac

SEQ ID NO: 20209 - DNA, 23 bp, Homo sapiens
gtgcacgtagccaagccggtgca

SEQ ID NO: 20210 - DNA, 23 bp, Homo sapiens
tgtgcacgtagccaagccggtgc

SEQ ID NO: 20211 - DNA, 23 bp, Homo sapiens
ctgtgcacgtagccaagccggtg

SEQ ID NO: 20212 - DNA, 23 bp, Homo sapiens
cctgtgcacgtagccaagccggt

SEQ ID NO: 20213 - DNA, 23 bp, Homo sapiens
ccctgtgcacgtagccaagccgg

SEQ ID NO: 20214 - DNA, 23 bp, Homo sapiens
tccctgtgcacgtagccaagccg

SEQ ID NO: 20215 - DNA, 23 bp, Homo sapiens
gtccctgtgcacgtagccaagcc

SEQ ID NO: 20216 - DNA, 23 bp, Homo sapiens
tgtccctgtgcacgtagccaagc

SEQ ID NO: 20217 - DNA, 23 bp, Homo sapiens
atgtccctgtgcacgtagccaag

SEQ ID NO: 20218 - DNA, 23 bp, Homo sapiens
gatgtccctgtgcacgtagccaa

SEQ ID NO: 20219 - DNA, 23 bp, Homo sapiens
tgatgtccctgtgcacgtagcca

SEQ ID NO: 20220 - DNA, 23 bp, Homo sapiens
ttgatgtccctgtgcacgtagcc

SEQ ID NO: 20221 - DNA, 23 bp, Homo sapiens
tttgatgtccctgtgcacgtagc

SEQ ID NO: 20222 - DNA, 23 bp, Homo sapiens
gtttgatgtccctgtgcacgtag

SEQ ID NO: 20223 - DNA, 23 bp, Homo sapiens
ggtttgatgtccctgtgcacgta

SEQ ID NO: 20224 - DNA, 23 bp, Homo sapiens
gggtttgatgtccctgtgcacgt

SEQ ID NO: 20225 - DNA, 23 bp, Homo sapiens
cgggtttgatgtccctgtgcacg

SEQ ID NO: 20226 - DNA, 23 bp, Homo sapiens
tcgggtttgatgtccctgtgcac

SEQ ID NO: 20227 - DNA, 23 bp, Homo sapiens
gtcgggtttgatgtccctgtgca

SEQ ID NO: 20228 - DNA, 23 bp, Homo sapiens
tgtcgggtttgatgtccctgtgc

SEQ ID NO: 20229 - DNA, 23 bp, Homo sapiens
ttgtcgggtttgatgtccctgtg

SEQ ID NO: 20230 - DNA, 23 bp, Homo sapiens
gttgtcgggtttgatgtccctgt

SEQ ID NO: 20231 - DNA, 23 bp, Homo sapiens
tgttgtcgggtttgatgtccctg

SEQ ID NO: 20232 - DNA, 23 bp, Homo sapiens
atgttgtcgggtttgatgtccct

SEQ ID NO: 20233 - DNA, 23 bp, Homo sapiens
gatgttgtcgggtttgatgtccc

SEQ ID NO: 20234 - DNA, 23 bp, Homo sapiens
ggatgttgtcgggtttgatgtcc

SEQ ID NO: 20235 - DNA, 23 bp, Homo sapiens
aggatgttgtcgggtttgatgtc

SEQ ID NO: 20236 - DNA, 23 bp, Homo sapiens
caggatgttgtcgggtttgatgt

SEQ ID NO: 20237 - DNA, 23 bp, Homo sapiens
gcaggatgttgtcgggtttgatg

SEQ ID NO: 20238 - DNA, 23 bp, Homo sapiens
agcaggatgttgtcgggtttgat

SEQ ID NO: 20239 - DNA, 23 bp, Homo sapiens
cagcaggatgttgtcgggtttga

SEQ ID NO: 20240 - DNA, 23 bp, Homo sapiens
ccagcaggatgttgtcgggtttg

SEQ ID NO: 20241 - DNA, 23 bp, Homo sapiens
tccagcaggatgttgtcgggttt

SEQ ID NO: 20242 - DNA, 23 bp, Homo sapiens
gtccagcaggatgttgtcgggtt

SEQ ID NO: 20243 - DNA, 23 bp, Homo sapiens
ggtccagcaggatgttgtcgggt

SEQ ID NO: 20244 - DNA, 23 bp, Homo sapiens
cggtccagcaggatgttgtcggg

SEQ ID NO: 20245 - DNA, 23 bp, Homo sapiens
gcggtccagcaggatgttgtcgg

SEQ ID NO: 20246 - DNA, 23 bp, Homo sapiens
agcggtccagcaggatgttgtcg

SEQ ID NO: 20247 - DNA, 23 bp, Homo sapiens
cagcggtccagcaggatgttgtc

SEQ ID NO: 20248 - DNA, 23 bp, Homo sapiens
acagcggtccagcaggatgttgt

SEQ ID NO: 20249 - DNA, 23 bp, Homo sapiens
cacagcggtccagcaggatgttg

SEQ ID NO: 20250 - DNA, 23 bp, Homo sapiens
ccacagcggtccagcaggatgtt

SEQ ID NO: 20251 - DNA, 23 bp, Homo sapiens
gccacagcggtccagcaggatgt

SEQ ID NO: 20252 - DNA, 23 bp, Homo sapiens
ggccacagcggtccagcaggatg

SEQ ID NO: 20253 - DNA, 23 bp, Homo sapiens
tggccacagcggtccagcaggat

SEQ ID NO: 20254 - DNA, 23 bp, Homo sapiens
gtggccacagcggtccagcagga

SEQ ID NO: 20255 - DNA, 23 bp, Homo sapiens
tgtggccacagcggtccagcagg

SEQ ID NO: 20256 - DNA, 23 bp, Homo sapiens
atgtggccacagcggtccagcag

SEQ ID NO: 20257 - DNA, 23 bp, Homo sapiens
gatgtggccacagcggtccagca

SEQ ID NO: 20258 - DNA, 23 bp, Homo sapiens
ggatgtggccacagcggtccagc

SEQ ID NO: 20259 - DNA, 23 bp, Homo sapiens
cggatgtggccacagcggtccag

SEQ ID NO: 20260 - DNA, 23 bp, Homo sapiens
gcggatgtggccacagcggtcca

SEQ ID NO: 20261 - DNA, 23 bp, Homo sapiens
ggcggatgtggccacagcggtcc

SEQ ID NO: 20262 - DNA, 23 bp, Homo sapiens
aggcggatgtggccacagcggtc

SEQ ID NO: 20263 - DNA, 23 bp, Homo sapiens
caggcggatgtggccacagcggt

SEQ ID NO: 20264 - DNA, 23 bp, Homo sapiens
ccaggcggatgtggccacagcgg

SEQ ID NO: 20265 - DNA, 23 bp, Homo sapiens
gccaggcggatgtggccacagcg

SEQ ID NO: 20266 - DNA, 23 bp, Homo sapiens
ggccaggcggatgtggccacagc

SEQ ID NO: 20267 - DNA, 23 bp, Homo sapiens
cggccaggcggatgtggccacag

SEQ ID NO: 20268 - DNA, 23 bp, Homo sapiens
tcggccaggcggatgtggccaca

SEQ ID NO: 20269 - DNA, 23 bp, Homo sapiens
gtcggccaggcggatgtggccac

SEQ ID NO: 20270 - DNA, 23 bp, Homo sapiens
agtcggccaggcggatgtggcca

SEQ ID NO: 20271 - DNA, 23 bp, Homo sapiens
aagtcggccaggcggatgtggcc

SEQ ID NO: 20272 - DNA, 23 bp, Homo sapiens
gaagtcggccaggcggatgtggc

SEQ ID NO: 20273 - DNA, 23 bp, Homo sapiens
cgaagtcggccaggcggatgtgg

SEQ ID NO: 20274 - DNA, 23 bp, Homo sapiens
ccgaagtcggccaggcggatgtg

SEQ ID NO: 20275 - DNA, 23 bp, Homo sapiens
gccgaagtcggccaggcggatgt

SEQ ID NO: 20276 - DNA, 23 bp, Homo sapiens
agccgaagtcggccaggcggatg

SEQ ID NO: 20277 - DNA, 23 bp, Homo sapiens
gagccgaagtcggccaggcggat

SEQ ID NO: 20278 - DNA, 23 bp, Homo sapiens
agagccgaagtcggccaggcgga

SEQ ID NO: 20279 - DNA, 23 bp, Homo sapiens
aagagccgaagtcggccaggcgg

SEQ ID NO: 20280 - DNA, 23 bp, Homo sapiens
caagagccgaagtcggccaggcg

SEQ ID NO: 20281 - DNA, 23 bp, Homo sapiens
gcaagagccgaagtcggccaggc

SEQ ID NO: 20282 - DNA, 23 bp, Homo sapiens
ggcaagagccgaagtcggccagg

SEQ ID NO: 20283 - DNA, 23 bp, Homo sapiens
aggcaagagccgaagtcggccag

SEQ ID NO: 20284 - DNA, 23 bp, Homo sapiens
gaggcaagagccgaagtcggcca

SEQ ID NO: 20285 - DNA, 23 bp, Homo sapiens
tgaggcaagagccgaagtcggcc

SEQ ID NO: 20286 - DNA, 23 bp, Homo sapiens
ttgaggcaagagccgaagtcggc

SEQ ID NO: 20287 - DNA, 23 bp, Homo sapiens
cttgaggcaagagccgaagtcgg

SEQ ID NO: 20288 - DNA, 23 bp, Homo sapiens
gcttgaggcaagagccgaagtcg

SEQ ID NO: 20289 - DNA, 23 bp, Homo sapiens
agcttgaggcaagagccgaagtc

SEQ ID NO: 20290 - DNA, 23 bp, Homo sapiens
cagcttgaggcaagagccgaagt

SEQ ID NO: 20291 - DNA, 23 bp, Homo sapiens
gcagcttgaggcaagagccgaag

SEQ ID NO: 20292 - DNA, 23 bp, Homo sapiens
cgcagcttgaggcaagagccgaa

SEQ ID NO: 20293 - DNA, 23 bp, Homo sapiens
ccgcagcttgaggcaagagccga

SEQ ID NO: 20294 - DNA, 23 bp, Homo sapiens
cccgcagcttgaggcaagagccg

SEQ ID NO: 20295 - DNA, 23 bp, Homo sapiens
gcccgcagcttgaggcaagagcc

SEQ ID NO: 20296 - DNA, 23 bp, Homo sapiens
tgcccgcagcttgaggcaagagc

SEQ ID NO: 20297 - DNA, 23 bp, Homo sapiens
ctgcccgcagcttgaggcaagag

SEQ ID NO: 20298 - DNA, 23 bp, Homo sapiens
tctgcccgcagcttgaggcaaga

SEQ ID NO: 20299 - DNA, 23 bp, Homo sapiens
atctgcccgcagcttgaggcaag

SEQ ID NO: 20300 - DNA, 23 bp, Homo sapiens
catctgcccgcagcttgaggcaa

SEQ ID NO: 20301 - DNA, 23 bp, Homo sapiens
ccatctgcccgcagcttgaggca

SEQ ID NO: 20302 - DNA, 23 bp, Homo sapiens
tccatctgcccgcagcttgaggc

SEQ ID NO: 20303 - DNA, 23 bp, Homo sapiens
ttccatctgcccgcagcttgagg

SEQ ID NO: 20304 - DNA, 23 bp, Homo sapiens
gttccatctgcccgcagcttgag

SEQ ID NO: 20305 - DNA, 23 bp, Homo sapiens
cgttccatctgcccgcagcttga

SEQ ID NO: 20306 - DNA, 23 bp, Homo sapiens
ccgttccatctgcccgcagcttg

SEQ ID NO: 20307 - DNA, 23 bp, Homo sapiens
accgttccatctgcccgcagctt

SEQ ID NO: 20308 - DNA, 23 bp, Homo sapiens
caccgttccatctgcccgcagct

SEQ ID NO: 20309 - DNA, 23 bp, Homo sapiens
gcaccgttccatctgcccgcagc

SEQ ID NO: 20310 - DNA, 23 bp, Homo sapiens
cgcaccgttccatctgcccgcag

SEQ ID NO: 20311 - DNA, 23 bp, Homo sapiens
ccgcaccgttccatctgcccgca

SEQ ID NO: 20312 - DNA, 23 bp, Homo sapiens
accgcaccgttccatctgcccgc

SEQ ID NO: 20313 - DNA, 23 bp, Homo sapiens
gaccgcaccgttccatctgcccg

SEQ ID NO: 20314 - DNA, 23 bp, Homo sapiens
cgaccgcaccgttccatctgccc

SEQ ID NO: 20315 - DNA, 23 bp, Homo sapiens
gcgaccgcaccgttccatctgcc

SEQ ID NO: 20316 - DNA, 23 bp, Homo sapiens
agcgaccgcaccgttccatctgc

SEQ ID NO: 20317 - DNA, 23 bp, Homo sapiens
cagcgaccgcaccgttccatctg

SEQ ID NO: 20318 - DNA, 23 bp, Homo sapiens
ccagcgaccgcaccgttccatct

SEQ ID NO: 20319 - DNA, 23 bp, Homo sapiens
accagcgaccgcaccgttccatc

SEQ ID NO: 20320 - DNA, 23 bp, Homo sapiens
caccagcgaccgcaccgttccat

SEQ ID NO: 20321 - DNA, 23 bp, Homo sapiens
ccaccagcgaccgcaccgttcca

SEQ ID NO: 20322 - DNA, 23 bp, Homo sapiens
gccaccagcgaccgcaccgttcc

SEQ ID NO: 20323 - DNA, 23 bp, Homo sapiens
agccaccagcgaccgcaccgttc

SEQ ID NO: 20324 - DNA, 23 bp, Homo sapiens
cagccaccagcgaccgcaccgtt

SEQ ID NO: 20325 - DNA, 23 bp, Homo sapiens
acagccaccagcgaccgcaccgt

SEQ ID NO: 20326 - DNA, 23 bp, Homo sapiens
cacagccaccagcgaccgcaccg

SEQ ID NO: 20327 - DNA, 23 bp, Homo sapiens
ccacagccaccagcgaccgcacc

SEQ ID NO: 20328 - DNA, 23 bp, Homo sapiens
cccacagccaccagcgaccgcac

SEQ ID NO: 20329 - DNA, 23 bp, Homo sapiens
gcccacagccaccagcgaccgca

SEQ ID NO: 20330 - DNA, 23 bp, Homo sapiens
tgcccacagccaccagcgaccgc

SEQ ID NO: 20331 - DNA, 23 bp, Homo sapiens
gtgcccacagccaccagcgaccg

SEQ ID NO: 20332 - DNA, 23 bp, Homo sapiens
ggtgcccacagccaccagcgacc

SEQ ID NO: 20333 - DNA, 23 bp, Homo sapiens
gggtgcccacagccaccagcgac

SEQ ID NO: 20334 - DNA, 23 bp, Homo sapiens
ggggtgcccacagccaccagcga

SEQ ID NO: 20335 - DNA, 23 bp, Homo sapiens
tggggtgcccacagccaccagcg

SEQ ID NO: 20336 - DNA, 23 bp, Homo sapiens
ctggggtgcccacagccaccagc

SEQ ID NO: 20337 - DNA, 23 bp, Homo sapiens
tctggggtgcccacagccaccag

SEQ ID NO: 20338 - DNA, 23 bp, Homo sapiens
gtctggggtgcccacagccacca

SEQ ID NO: 20339 - DNA, 23 bp, Homo sapiens
agtctggggtgcccacagccacc

SEQ ID NO: 20340 - DNA, 23 bp, Homo sapiens
tagtctggggtgcccacagccac

SEQ ID NO: 20341 - DNA, 23 bp, Homo sapiens
gtagtctggggtgcccacagcca

SEQ ID NO: 20342 - DNA, 23 bp, Homo sapiens
ggtagtctggggtgcccacagcc

SEQ ID NO: 20343 - DNA, 23 bp, Homo sapiens
aggtagtctggggtgcccacagc

SEQ ID NO: 20344 - DNA, 23 bp, Homo sapiens
caggtagtctggggtgcccacag

SEQ ID NO: 20345 - DNA, 23 bp, Homo sapiens
acaggtagtctggggtgcccaca

SEQ ID NO: 20346 - DNA, 23 bp, Homo sapiens
gacaggtagtctggggtgcccac

SEQ ID NO: 20347 - DNA, 23 bp, Homo sapiens
ggacaggtagtctggggtgccca

SEQ ID NO: 20348 - DNA, 23 bp, Homo sapiens
gggacaggtagtctggggtgccc

SEQ ID NO: 20349 - DNA, 23 bp, Homo sapiens
ggggacaggtagtctggggtgcc

SEQ ID NO: 20350 - DNA, 23 bp, Homo sapiens
gggggacaggtagtctggggtgc

SEQ ID NO: 20351 - DNA, 23 bp, Homo sapiens
cgggggacaggtagtctggggtg

SEQ ID NO: 20352 - DNA, 23 bp, Homo sapiens
tcgggggacaggtagtctggggt

SEQ ID NO: 20353 - DNA, 23 bp, Homo sapiens
ctcgggggacaggtagtctgggg

SEQ ID NO: 20354 - DNA, 23 bp, Homo sapiens
tctcgggggacaggtagtctggg

SEQ ID NO: 20355 - DNA, 23 bp, Homo sapiens
atctcgggggacaggtagtctgg

SEQ ID NO: 20356 - DNA, 23 bp, Homo sapiens
gatctcgggggacaggtagtctg

SEQ ID NO: 20357 - DNA, 23 bp, Homo sapiens
ggatctcgggggacaggtagtct

SEQ ID NO: 20358 - DNA, 23 bp, Homo sapiens
aggatctcgggggacaggtagtc

SEQ ID NO: 20359 - DNA, 23 bp, Homo sapiens
caggatctcgggggacaggtagt

SEQ ID NO: 20360 - DNA, 23 bp, Homo sapiens
gcaggatctcgggggacaggtag

SEQ ID NO: 20361 - DNA, 23 bp, Homo sapiens
tgcaggatctcgggggacaggta

SEQ ID NO: 20362 - DNA, 23 bp, Homo sapiens
ctgcaggatctcgggggacaggt

SEQ ID NO: 20363 - DNA, 23 bp, Homo sapiens
cctgcaggatctcgggggacagg

SEQ ID NO: 20364 - DNA, 23 bp, Homo sapiens
gcctgcaggatctcgggggacag

SEQ ID NO: 20365 - DNA, 23 bp, Homo sapiens
agcctgcaggatctcgggggaca

SEQ ID NO: 20366 - DNA, 23 bp, Homo sapiens
cagcctgcaggatctcgggggac

SEQ ID NO: 20367 - DNA, 23 bp, Homo sapiens
acagcctgcaggatctcggggga

SEQ ID NO: 20368 - DNA, 23 bp, Homo sapiens
cacagcctgcaggatctcggggg

SEQ ID NO: 20369 - DNA, 23 bp, Homo sapiens
ccacagcctgcaggatctcgggg

SEQ ID NO: 20370 - DNA, 23 bp, Homo sapiens
cccacagcctgcaggatctcggg

SEQ ID NO: 20371 - DNA, 23 bp, Homo sapiens
gcccacagcctgcaggatctcgg

SEQ ID NO: 20372 - DNA, 23 bp, Homo sapiens
cgcccacagcctgcaggatctcg

SEQ ID NO: 20373 - DNA, 23 bp, Homo sapiens
ccgcccacagcctgcaggatctc

SEQ ID NO: 20374 - DNA, 23 bp, Homo sapiens
accgcccacagcctgcaggatct

SEQ ID NO: 20375 - DNA, 23 bp, Homo sapiens
caccgcccacagcctgcaggatc

SEQ ID NO: 20376 - DNA, 23 bp, Homo sapiens
ccaccgcccacagcctgcaggat

SEQ ID NO: 20377 - DNA, 23 bp, Homo sapiens
cccaccgcccacagcctgcagga

SEQ ID NO: 20378 - DNA, 23 bp, Homo sapiens
gcccaccgcccacagcctgcagg

SEQ ID NO: 20379 - DNA, 23 bp, Homo sapiens
ggcccaccgcccacagcctgcag

SEQ ID NO: 20380 - DNA, 23 bp, Homo sapiens
aggcccaccgcccacagcctgca

SEQ ID NO: 20381 - DNA, 23 bp, Homo sapiens
caggcccaccgcccacagcctgc

SEQ ID NO: 20382 - DNA, 23 bp, Homo sapiens
ccaggcccaccgcccacagcctg

SEQ ID NO: 20383 - DNA, 23 bp, Homo sapiens
cccaggcccaccgcccacagcct

SEQ ID NO: 20384 - DNA, 23 bp, Homo sapiens
tcccaggcccaccgcccacagcc

SEQ ID NO: 20385 - DNA, 23 bp, Homo sapiens
gtcccaggcccaccgcccacagc

SEQ ID NO: 20386 - DNA, 23 bp, Homo sapiens
tgtcccaggcccaccgcccacag

SEQ ID NO: 20387 - DNA, 23 bp, Homo sapiens
ctgtcccaggcccaccgcccaca

SEQ ID NO: 20388 - DNA, 23 bp, Homo sapiens
cctgtcccaggcccaccgcccac

SEQ ID NO: 20389 - DNA, 23 bp, Homo sapiens
gcctgtcccaggcccaccgccca

SEQ ID NO: 20390 - DNA, 23 bp, Homo sapiens
tgcctgtcccaggcccaccgccc

SEQ ID NO: 20391 - DNA, 23 bp, Homo sapiens
ctgcctgtcccaggcccaccgcc

SEQ ID NO: 20392 - DNA, 23 bp, Homo sapiens
gctgcctgtcccaggcccaccgc

SEQ ID NO: 20393 - DNA, 23 bp, Homo sapiens
agctgcctgtcccaggcccaccg

SEQ ID NO: 20394 - DNA, 23 bp, Homo sapiens
tagctgcctgtcccaggcccacc

SEQ ID NO: 20395 - DNA, 23 bp, Homo sapiens
gtagctgcctgtcccaggcccac

SEQ ID NO: 20396 - DNA, 23 bp, Homo sapiens
cgtagctgcctgtcccaggccca

SEQ ID NO: 20397 - DNA, 23 bp, Homo sapiens
ccgtagctgcctgtcccaggccc

SEQ ID NO: 20398 - DNA, 23 bp, Homo sapiens
cccgtagctgcctgtcccaggcc

SEQ ID NO: 20399 - DNA, 23 bp, Homo sapiens
gcccgtagctgcctgtcccaggc

SEQ ID NO: 20400 - DNA, 23 bp, Homo sapiens
ggcccgtagctgcctgtcccagg

SEQ ID NO: 20401 - DNA, 23 bp, Homo sapiens
gggcccgtagctgcctgtcccag

SEQ ID NO: 20402 - DNA, 23 bp, Homo sapiens
cgggcccgtagctgcctgtccca

SEQ ID NO: 20403 - DNA, 23 bp, Homo sapiens
tcgggcccgtagctgcctgtccc

SEQ ID NO: 20404 - DNA, 23 bp, Homo sapiens
ctcgggcccgtagctgcctgtcc

SEQ ID NO: 20405 - DNA, 23 bp, Homo sapiens
actcgggcccgtagctgcctgtc

SEQ ID NO: 20406 - DNA, 23 bp, Homo sapiens
cactcgggcccgtagctgcctgt

SEQ ID NO: 20407 - DNA, 23 bp, Homo sapiens
acactcgggcccgtagctgcctg

SEQ ID NO: 20408 - DNA, 23 bp, Homo sapiens
cacactcgggcccgtagctgcct

SEQ ID NO: 20409 - DNA, 23 bp, Homo sapiens
tcacactcgggcccgtagctgcc

SEQ ID NO: 20410 - DNA, 23 bp, Homo sapiens
gtcacactcgggcccgtagctgc

SEQ ID NO: 20411 - DNA, 23 bp, Homo sapiens
agtcacactcgggcccgtagctg

SEQ ID NO: 20412 - DNA, 23 bp, Homo sapiens
cagtcacactcgggcccgtagct

SEQ ID NO: 20413 - DNA, 23 bp, Homo sapiens
ccagtcacactcgggcccgtagc

SEQ ID NO: 20414 - DNA, 23 bp, Homo sapiens
accagtcacactcgggcccgtag

SEQ ID NO: 20415 - DNA, 23 bp, Homo sapiens
caccagtcacactcgggcccgta

SEQ ID NO: 20416 - DNA, 23 bp, Homo sapiens
ccaccagtcacactcgggcccgt

SEQ ID NO: 20417 - DNA, 23 bp, Homo sapiens
cccaccagtcacactcgggcccg

SEQ ID NO: 20418 - DNA, 23 bp, Homo sapiens
gcccaccagtcacactcgggccc

SEQ ID NO: 20419 - DNA, 23 bp, Homo sapiens
cgcccaccagtcacactcgggcc

SEQ ID NO: 20420 - DNA, 23 bp, Homo sapiens
gcgcccaccagtcacactcgggc

SEQ ID NO: 20421 - DNA, 23 bp, Homo sapiens
agcgcccaccagtcacactcggg

SEQ ID NO: 20422 - DNA, 23 bp, Homo sapiens
cagcgcccaccagtcacactcgg

SEQ ID NO: 20423 - DNA, 23 bp, Homo sapiens
ccagcgcccaccagtcacactcg

SEQ ID NO: 20424 - DNA, 23 bp, Homo sapiens
cccagcgcccaccagtcacactc

SEQ ID NO: 20425 - DNA, 23 bp, Homo sapiens
acccagcgcccaccagtcacact

SEQ ID NO: 20426 - DNA, 23 bp, Homo sapiens
cacccagcgcccaccagtcacac

SEQ ID NO: 20427 - DNA, 23 bp, Homo sapiens
acacccagcgcccaccagtcaca

SEQ ID NO: 20428 - DNA, 23 bp, Homo sapiens
tacacccagcgcccaccagtcac

SEQ ID NO: 20429 - DNA, 23 bp, Homo sapiens
atacacccagcgcccaccagtca

SEQ ID NO: 20430 - DNA, 23 bp, Homo sapiens
aatacacccagcgcccaccagtc

SEQ ID NO: 20431 - DNA, 23 bp, Homo sapiens
gaatacacccagcgcccaccagt

SEQ ID NO: 20432 - DNA, 23 bp, Homo sapiens
cgaatacacccagcgcccaccag

SEQ ID NO: 20433 - DNA, 23 bp, Homo sapiens
gcgaatacacccagcgcccacca

SEQ ID NO: 20434 - DNA, 23 bp, Homo sapiens
ggcgaatacacccagcgcccacc

SEQ ID NO: 20435 - DNA, 23 bp, Homo sapiens
aggcgaatacacccagcgcccac

SEQ ID NO: 20436 - DNA, 23 bp, Homo sapiens
taggcgaatacacccagcgccca

SEQ ID NO: 20437 - DNA, 23 bp, Homo sapiens
ataggcgaatacacccagcgccc

SEQ ID NO: 20438 - DNA, 23 bp, Homo sapiens
cataggcgaatacacccagcgcc

SEQ ID NO: 20439 - DNA, 23 bp, Homo sapiens
tcataggcgaatacacccagcgc

SEQ ID NO: 20440 - DNA, 23 bp, Homo sapiens
ttcataggcgaatacacccagcg

SEQ ID NO: 20441 - DNA, 23 bp, Homo sapiens
tttcataggcgaatacacccagc

SEQ ID NO: 20442 - DNA, 23 bp, Homo sapiens
atttcataggcgaatacacccag

SEQ ID NO: 20443 - DNA, 23 bp, Homo sapiens
catttcataggcgaatacaccca

SEQ ID NO: 20444 - DNA, 23 bp, Homo sapiens
acatttcataggcgaatacaccc

SEQ ID NO: 20445 - DNA, 23 bp, Homo sapiens
aacatttcataggcgaatacacc

SEQ ID NO: 20446 - DNA, 23 bp, Homo sapiens
gaacatttcataggcgaatacac

SEQ ID NO: 20447 - DNA, 23 bp, Homo sapiens
agaacatttcataggcgaataca

SEQ ID NO: 20448 - DNA, 23 bp, Homo sapiens
tagaacatttcataggcgaatac

SEQ ID NO: 20449 - DNA, 23 bp, Homo sapiens
atagaacatttcataggcgaata

SEQ ID NO: 20450 - DNA, 23 bp, Homo sapiens
catagaacatttcataggcgaat

SEQ ID NO: 20451 - DNA, 23 bp, Homo sapiens
ccatagaacatttcataggcgaa

SEQ ID NO: 20452 - DNA, 23 bp, Homo sapiens
cccatagaacatttcataggcga

SEQ ID NO: 20453 - DNA, 23 bp, Homo sapiens
gcccatagaacatttcataggcg

SEQ ID NO: 20454 - DNA, 23 bp, Homo sapiens
tgcccatagaacatttcataggc

SEQ ID NO: 20455 - DNA, 23 bp, Homo sapiens
ctgcccatagaacatttcatagg

SEQ ID NO: 20456 - DNA, 23 bp, Homo sapiens
tctgcccatagaacatttcatag

SEQ ID NO: 20457 - DNA, 23 bp, Homo sapiens
gtctgcccatagaacatttcata

SEQ ID NO: 20458 - DNA, 23 bp, Homo sapiens
cgtctgcccatagaacatttcat

SEQ ID NO: 20459 - DNA, 23 bp, Homo sapiens
gcgtctgcccatagaacatttca

SEQ ID NO: 20460 - DNA, 23 bp, Homo sapiens
ggcgtctgcccatagaacatttc

SEQ ID NO: 20461 - DNA, 23 bp, Homo sapiens
gggcgtctgcccatagaacattt

SEQ ID NO: 20462 - DNA, 23 bp, Homo sapiens
agggcgtctgcccatagaacatt

SEQ ID NO: 20463 - DNA, 23 bp, Homo sapiens
aagggcgtctgcccatagaacat

SEQ ID NO: 20464 - DNA, 23 bp, Homo sapiens
gaagggcgtctgcccatagaaca

SEQ ID NO: 20465 - DNA, 23 bp, Homo sapiens
agaagggcgtctgcccatagaac

SEQ ID NO: 20466 - DNA, 23 bp, Homo sapiens
tagaagggcgtctgcccatagaa

SEQ ID NO: 20467 - DNA, 23 bp, Homo sapiens
gtagaagggcgtctgcccataga

SEQ ID NO: 20468 - DNA, 23 bp, Homo sapiens
cgtagaagggcgtctgcccatag

SEQ ID NO: 20469 - DNA, 23 bp, Homo sapiens
gcgtagaagggcgtctgcccata

SEQ ID NO: 20470 - DNA, 23 bp, Homo sapiens
cgcgtagaagggcgtctgcccat

SEQ ID NO: 20471 - DNA, 23 bp, Homo sapiens
ccgcgtagaagggcgtctgccca

SEQ ID NO: 20472 - DNA, 23 bp, Homo sapiens
tccgcgtagaagggcgtctgccc

SEQ ID NO: 20473 - DNA, 23 bp, Homo sapiens
atccgcgtagaagggcgtctgcc

SEQ ID NO: 20474 - DNA, 23 bp, Homo sapiens
aatccgcgtagaagggcgtctgc

SEQ ID NO: 20475 - DNA, 23 bp, Homo sapiens
gaatccgcgtagaagggcgtctg

SEQ ID NO: 20476 - DNA, 23 bp, Homo sapiens
ggaatccgcgtagaagggcgtct

SEQ ID NO: 20477 - DNA, 23 bp, Homo sapiens
tggaatccgcgtagaagggcgtc

SEQ ID NO: 20478 - DNA, 23 bp, Homo sapiens
gtggaatccgcgtagaagggcgt

SEQ ID NO: 20479 - DNA, 23 bp, Homo sapiens
cgtggaatccgcgtagaagggcg

SEQ ID NO: 20480 - DNA, 23 bp, Homo sapiens
ccgtggaatccgcgtagaagggc

SEQ ID NO: 20481 - DNA, 23 bp, Homo sapiens
gccgtggaatccgcgtagaaggg

SEQ ID NO: 20482 - DNA, 23 bp, Homo sapiens
cgccgtggaatccgcgtagaagg

SEQ ID NO: 20483 - DNA, 23 bp, Homo sapiens
ccgccgtggaatccgcgtagaag

SEQ ID NO: 20484 - DNA, 23 bp, Homo sapiens
tccgccgtggaatccgcgtagaa

SEQ ID NO: 20485 - DNA, 23 bp, Homo sapiens
ctccgccgtggaatccgcgtaga

SEQ ID NO: 20486 - DNA, 23 bp, Homo sapiens
tctccgccgtggaatccgcgtag

SEQ ID NO: 20487 - DNA, 23 bp, Homo sapiens
gtctccgccgtggaatccgcgta

SEQ ID NO: 20488 - DNA, 23 bp, Homo sapiens
ggtctccgccgtggaatccgcgt

SEQ ID NO: 20489 - DNA, 23 bp, Homo sapiens
aggtctccgccgtggaatccgcg

SEQ ID NO: 20490 - DNA, 23 bp, Homo sapiens
taggtctccgccgtggaatccgc

SEQ ID NO: 20491 - DNA, 23 bp, Homo sapiens
ataggtctccgccgtggaatccg

SEQ ID NO: 20492 - DNA, 23 bp, Homo sapiens
cataggtctccgccgtggaatcc

SEQ ID NO: 20493 - DNA, 23 bp, Homo sapiens
ccataggtctccgccgtggaatc

SEQ ID NO: 20494 - DNA, 23 bp, Homo sapiens
gccataggtctccgccgtggaat

SEQ ID NO: 20495 - DNA, 23 bp, Homo sapiens
tgccataggtctccgccgtggaa

SEQ ID NO: 20496 - DNA, 23 bp, Homo sapiens
ttgccataggtctccgccgtgga

SEQ ID NO: 20497 - DNA, 23 bp, Homo sapiens
cttgccataggtctccgccgtgg

SEQ ID NO: 20498 - DNA, 23 bp, Homo sapiens
tcttgccataggtctccgccgtg

SEQ ID NO: 20499 - DNA, 23 bp, Homo sapiens
atcttgccataggtctccgccgt

SEQ ID NO: 20500 - DNA, 23 bp, Homo sapiens
gatcttgccataggtctccgccg

SEQ ID NO: 20501 - DNA, 23 bp, Homo sapiens
cgatcttgccataggtctccgcc

SEQ ID NO: 20502 - DNA, 23 bp, Homo sapiens
acgatcttgccataggtctccgc

SEQ ID NO: 20503 - DNA, 23 bp, Homo sapiens
gacgatcttgccataggtctccg

SEQ ID NO: 20504 - DNA, 23 bp, Homo sapiens
ggacgatcttgccataggtctcc

SEQ ID NO: 20505 - DNA, 23 bp, Homo sapiens
tggacgatcttgccataggtctc

SEQ ID NO: 20506 - DNA, 23 bp, Homo sapiens
gtggacgatcttgccataggtct

SEQ ID NO: 20507 - DNA, 23 bp, Homo sapiens
agtggacgatcttgccataggtc

SEQ ID NO: 20508 - DNA, 23 bp, Homo sapiens
tagtggacgatcttgccataggt

SEQ ID NO: 20509 - DNA, 23 bp, Homo sapiens
gtagtggacgatcttgccatagg

SEQ ID NO: 20510 - DNA, 23 bp, Homo sapiens
tgtagtggacgatcttgccatag

SEQ ID NO: 20511 - DNA, 23 bp, Homo sapiens
ttgtagtggacgatcttgccata

SEQ ID NO: 20512 - DNA, 23 bp, Homo sapiens
cttgtagtggacgatcttgccat

SEQ ID NO: 20513 - DNA, 23 bp, Homo sapiens
ccttgtagtggacgatcttgcca

SEQ ID NO: 20514 - DNA, 23 bp, Homo sapiens
tccttgtagtggacgatcttgcc

SEQ ID NO: 20515 - DNA, 23 bp, Homo sapiens
ctccttgtagtggacgatcttgc

SEQ ID NO: 20516 - DNA, 23 bp, Homo sapiens
gctccttgtagtggacgatcttg

SEQ ID NO: 20517 - DNA, 23 bp, Homo sapiens
tgctccttgtagtggacgatctt

SEQ ID NO: 20518 - DNA, 23 bp, Homo sapiens
gtgctccttgtagtggacgatct

SEQ ID NO: 20519 - DNA, 23 bp, Homo sapiens
ggtgctccttgtagtggacgatc

SEQ ID NO: 20520 - DNA, 23 bp, Homo sapiens
aggtgctccttgtagtggacgat

SEQ ID NO: 20521 - DNA, 23 bp, Homo sapiens
gaggtgctccttgtagtggacga

SEQ ID NO: 20522 - DNA, 23 bp, Homo sapiens
agaggtgctccttgtagtggacg

SEQ ID NO: 20523 - DNA, 23 bp, Homo sapiens
gagaggtgctccttgtagtggac

SEQ ID NO: 20524 - DNA, 23 bp, Homo sapiens
agagaggtgctccttgtagtgga

SEQ ID NO: 20525 - DNA, 23 bp, Homo sapiens
gagagaggtgctccttgtagtgg

SEQ ID NO: 20526 - DNA, 23 bp, Homo sapiens
agagagaggtgctccttgtagtg

SEQ ID NO: 20527 - DNA, 23 bp, Homo sapiens
cagagagaggtgctccttgtagt

SEQ ID NO: 20528 - DNA, 23 bp, Homo sapiens
gcagagagaggtgctccttgtag

SEQ ID NO: 20529 - DNA, 23 bp, Homo sapiens
ggcagagagaggtgctccttgta

SEQ ID NO: 20530 - DNA, 23 bp, Homo sapiens
cggcagagagaggtgctccttgt

SEQ ID NO: 20531 - DNA, 23 bp, Homo sapiens
gcggcagagagaggtgctccttg

SEQ ID NO: 20532 - DNA, 23 bp, Homo sapiens
agcggcagagagaggtgctcctt

SEQ ID NO: 20533 - DNA, 23 bp, Homo sapiens
cagcggcagagagaggtgctcct

SEQ ID NO: 20534 - DNA, 23 bp, Homo sapiens
ccagcggcagagagaggtgctcc

SEQ ID NO: 20535 - DNA, 23 bp, Homo sapiens
accagcggcagagagaggtgctc

SEQ ID NO: 20536 - DNA, 23 bp, Homo sapiens
caccagcggcagagagaggtgct

SEQ ID NO: 20537 - DNA, 23 bp, Homo sapiens
ccaccagcggcagagagaggtgc

SEQ ID NO: 20538 - DNA, 23 bp, Homo sapiens
tccaccagcggcagagagaggtg

SEQ ID NO: 20539 - DNA, 23 bp, Homo sapiens
gtccaccagcggcagagagaggt

SEQ ID NO: 20540 - DNA, 23 bp, Homo sapiens
cgtccaccagcggcagagagagg

SEQ ID NO: 20541 - DNA, 23 bp, Homo sapiens
tcgtccaccagcggcagagagag

SEQ ID NO: 20542 - DNA, 23 bp, Homo sapiens
ttcgtccaccagcggcagagaga

SEQ ID NO: 20543 - DNA, 23 bp, Homo sapiens
cttcgtccaccagcggcagagag

SEQ ID NO: 20544 - DNA, 23 bp, Homo sapiens
ccttcgtccaccagcggcagaga

SEQ ID NO: 20545 - DNA, 23 bp, Homo sapiens
cccttcgtccaccagcggcagag

SEQ ID NO: 20546 - DNA, 23 bp, Homo sapiens
ccccttcgtccaccagcggcaga

SEQ ID NO: 20547 - DNA, 23 bp, Homo sapiens
accccttcgtccaccagcggcag

SEQ ID NO: 20548 - DNA, 23 bp, Homo sapiens
gaccccttcgtccaccagcggca

SEQ ID NO: 20549 - DNA, 23 bp, Homo sapiens
ggaccccttcgtccaccagcggc

SEQ ID NO: 20550 - DNA, 23 bp, Homo sapiens
gggaccccttcgtccaccagcgg

SEQ ID NO: 20551 - DNA, 23 bp, Homo sapiens
agggaccccttcgtccaccagcg

SEQ ID NO: 20552 - DNA, 23 bp, Homo sapiens
cagggaccccttcgtccaccagc

SEQ ID NO: 20553 - DNA, 23 bp, Homo sapiens
tcagggaccccttcgtccaccag

SEQ ID NO: 20554 - DNA, 23 bp, Homo sapiens
ctcagggaccccttcgtccacca

SEQ ID NO: 20555 - DNA, 23 bp, Homo sapiens
cctcagggaccccttcgtccacc

SEQ ID NO: 20556 - DNA, 23 bp, Homo sapiens
tcctcagggaccccttcgtccac

SEQ ID NO: 20557 - DNA, 23 bp, Homo sapiens
ctcctcagggaccccttcgtcca

SEQ ID NO: 20558 - DNA, 23 bp, Homo sapiens
cctcctcagggaccccttcgtcc

SEQ ID NO: 20559 - DNA, 23 bp, Homo sapiens
gcctcctcagggaccccttcgtc

SEQ ID NO: 20560 - DNA, 23 bp, Homo sapiens
agcctcctcagggaccccttcgt

SEQ ID NO: 20561 - DNA, 23 bp, Homo sapiens
gagcctcctcagggaccccttcg

SEQ ID NO: 20562 - DNA, 23 bp, Homo sapiens
cgagcctcctcagggaccccttc

SEQ ID NO: 20563 - DNA, 23 bp, Homo sapiens
tcgagcctcctcagggacccctt

SEQ ID NO: 20564 - DNA, 23 bp, Homo sapiens
ctcgagcctcctcagggacccct

SEQ ID NO: 20565 - DNA, 23 bp, Homo sapiens
tctcgagcctcctcagggacccc

SEQ ID NO: 20566 - DNA, 23 bp, Homo sapiens
gtctcgagcctcctcagggaccc

SEQ ID NO: 20567 - DNA, 23 bp, Homo sapiens
agtctcgagcctcctcagggacc

SEQ ID NO: 20568 - DNA, 23 bp, Homo sapiens
aagtctcgagcctcctcagggac

SEQ ID NO: 20569 - DNA, 23 bp, Homo sapiens
gaagtctcgagcctcctcaggga

SEQ ID NO: 20570 - DNA, 23 bp, Homo sapiens
tgaagtctcgagcctcctcaggg

SEQ ID NO: 20571 - DNA, 23 bp, Homo sapiens
atgaagtctcgagcctcctcagg

SEQ ID NO: 20572 - DNA, 23 bp, Homo sapiens
aatgaagtctcgagcctcctcag

SEQ ID NO: 20573 - DNA, 23 bp, Homo sapiens
gaatgaagtctcgagcctcctca

SEQ ID NO: 20574 - DNA, 23 bp, Homo sapiens
tgaatgaagtctcgagcctcctc

SEQ ID NO: 20575 - DNA, 23 bp, Homo sapiens
ctgaatgaagtctcgagcctcct

SEQ ID NO: 20576 - DNA, 23 bp, Homo sapiens
gctgaatgaagtctcgagcctcc

SEQ ID NO: 20577 - DNA, 23 bp, Homo sapiens
cgctgaatgaagtctcgagcctc

SEQ ID NO: 20578 - DNA, 23 bp, Homo sapiens
ccgctgaatgaagtctcgagcct

SEQ ID NO: 20579 - DNA, 23 bp, Homo sapiens
accgctgaatgaagtctcgagcc

SEQ ID NO: 20580 - DNA, 23 bp, Homo sapiens
aaccgctgaatgaagtctcgagc

SEQ ID NO: 20581 - DNA, 23 bp, Homo sapiens
caaccgctgaatgaagtctcgag

SEQ ID NO: 20582 - DNA, 23 bp, Homo sapiens
gcaaccgctgaatgaagtctcga

SEQ ID NO: 20583 - DNA, 23 bp, Homo sapiens
agcaaccgctgaatgaagtctcg

SEQ ID NO: 20584 - DNA, 23 bp, Homo sapiens
cagcaaccgctgaatgaagtctc

SEQ ID NO: 20585 - DNA, 23 bp, Homo sapiens
acagcaaccgctgaatgaagtct

SEQ ID NO: 20586 - DNA, 23 bp, Homo sapiens
cacagcaaccgctgaatgaagtc

SEQ ID NO: 20587 - DNA, 23 bp, Homo sapiens
acacagcaaccgctgaatgaagt

SEQ ID NO: 20588 - DNA, 23 bp, Homo sapiens
gacacagcaaccgctgaatgaag

SEQ ID NO: 20589 - DNA, 23 bp, Homo sapiens
ggacacagcaaccgctgaatgaa

SEQ ID NO: 20590 - DNA, 23 bp, Homo sapiens
gggacacagcaaccgctgaatga

SEQ ID NO: 20591 - DNA, 23 bp, Homo sapiens
ggggacacagcaaccgctgaatg

SEQ ID NO: 20592 - DNA, 23 bp, Homo sapiens
gggggacacagcaaccgctgaat

SEQ ID NO: 20593 - DNA, 23 bp, Homo sapiens
cgggggacacagcaaccgctgaa

SEQ ID NO: 20594 - DNA, 23 bp, Homo sapiens
ccgggggacacagcaaccgctga

SEQ ID NO: 20595 - DNA, 23 bp, Homo sapiens
tccgggggacacagcaaccgctg

SEQ ID NO: 20596 - DNA, 23 bp, Homo sapiens
ctccgggggacacagcaaccgct

SEQ ID NO: 20597 - DNA, 23 bp, Homo sapiens
tctccgggggacacagcaaccgc

SEQ ID NO: 20598 - DNA, 23 bp, Homo sapiens
gtctccgggggacacagcaaccg

SEQ ID NO: 20599 - DNA, 23 bp, Homo sapiens
tgtctccgggggacacagcaacc

SEQ ID NO: 20600 - DNA, 23 bp, Homo sapiens
gtgtctccgggggacacagcaac

SEQ ID NO: 20601 - DNA, 23 bp, Homo sapiens
cgtgtctccgggggacacagcaa

SEQ ID NO: 20602 - DNA, 23 bp, Homo sapiens
ccgtgtctccgggggacacagca

SEQ ID NO: 20603 - DNA, 23 bp, Homo sapiens
gccgtgtctccgggggacacagc

SEQ ID NO: 20604 - DNA, 23 bp, Homo sapiens
agccgtgtctccgggggacacag

SEQ ID NO: 20605 - DNA, 23 bp, Homo sapiens
cagccgtgtctccgggggacaca

SEQ ID NO: 20606 - DNA, 23 bp, Homo sapiens
ccagccgtgtctccgggggacac

SEQ ID NO: 20607 - DNA, 23 bp, Homo sapiens
cccagccgtgtctccgggggaca

SEQ ID NO: 20608 - DNA, 23 bp, Homo sapiens
gcccagccgtgtctccgggggac

SEQ ID NO: 20609 - DNA, 23 bp, Homo sapiens
ggcccagccgtgtctccggggga

SEQ ID NO: 20610 - DNA, 23 bp, Homo sapiens
cggcccagccgtgtctccggggg

SEQ ID NO: 20611 - DNA, 23 bp, Homo sapiens
ccggcccagccgtgtctccgggg

SEQ ID NO: 20612 - DNA, 23 bp, Homo sapiens
cccggcccagccgtgtctccggg

SEQ ID NO: 20613 - DNA, 23 bp, Homo sapiens
ccccggcccagccgtgtctccgg

SEQ ID NO: 20614 - DNA, 23 bp, Homo sapiens
accccggcccagccgtgtctccg

SEQ ID NO: 20615 - DNA, 23 bp, Homo sapiens
caccccggcccagccgtgtctcc

SEQ ID NO: 20616 - DNA, 23 bp, Homo sapiens
ccaccccggcccagccgtgtctc

SEQ ID NO: 20617 - DNA, 23 bp, Homo sapiens
tccaccccggcccagccgtgtct

SEQ ID NO: 20618 - DNA, 23 bp, Homo sapiens
ctccaccccggcccagccgtgtc

SEQ ID NO: 20619 - DNA, 23 bp, Homo sapiens
gctccaccccggcccagccgtgt

SEQ ID NO: 20620 - DNA, 23 bp, Homo sapiens
tgctccaccccggcccagccgtg

SEQ ID NO: 20621 - DNA, 23 bp, Homo sapiens
ctgctccaccccggcccagccgt

SEQ ID NO: 20622 - DNA, 23 bp, Homo sapiens
cctgctccaccccggcccagccg

SEQ ID NO: 20623 - DNA, 23 bp, Homo sapiens
gcctgctccaccccggcccagcc

SEQ ID NO: 20624 - DNA, 23 bp, Homo sapiens
cgcctgctccaccccggcccagc

SEQ ID NO: 20625 - DNA, 23 bp, Homo sapiens
tcgcctgctccaccccggcccag

SEQ ID NO: 20626 - DNA, 23 bp, Homo sapiens
gtcgcctgctccaccccggccca

SEQ ID NO: 20627 - DNA, 23 bp, Homo sapiens
agtcgcctgctccaccccggccc

SEQ ID NO: 20628 - DNA, 23 bp, Homo sapiens
aagtcgcctgctccaccccggcc

SEQ ID NO: 20629 - DNA, 23 bp, Homo sapiens
gaagtcgcctgctccaccccggc

SEQ ID NO: 20630 - DNA, 23 bp, Homo sapiens
ggaagtcgcctgctccaccccgg

SEQ ID NO: 20631 - DNA, 23 bp, Homo sapiens
cggaagtcgcctgctccaccccg

SEQ ID NO: 20632 - DNA, 23 bp, Homo sapiens
ccggaagtcgcctgctccacccc

SEQ ID NO: 20633 - DNA, 23 bp, Homo sapiens
tccggaagtcgcctgctccaccc

SEQ ID NO: 20634 - DNA, 23 bp, Homo sapiens
gtccggaagtcgcctgctccacc

SEQ ID NO: 20635 - DNA, 23 bp, Homo sapiens
tgtccggaagtcgcctgctccac

SEQ ID NO: 20636 - DNA, 23 bp, Homo sapiens
gtgtccggaagtcgcctgctcca

SEQ ID NO: 20637 - DNA, 23 bp, Homo sapiens
tgtgtccggaagtcgcctgctcc

SEQ ID NO: 20638 - DNA, 23 bp, Homo sapiens
atgtgtccggaagtcgcctgctc

SEQ ID NO: 20639 - DNA, 23 bp, Homo sapiens
gatgtgtccggaagtcgcctgct

SEQ ID NO: 20640 - DNA, 23 bp, Homo sapiens
ggatgtgtccggaagtcgcctgc

SEQ ID NO: 20641 - DNA, 23 bp, Homo sapiens
gggatgtgtccggaagtcgcctg

SEQ ID NO: 20642 - DNA, 23 bp, Homo sapiens
agggatgtgtccggaagtcgcct

SEQ ID NO: 20643 - DNA, 23 bp, Homo sapiens
aagggatgtgtccggaagtcgcc

SEQ ID NO: 20644 - DNA, 23 bp, Homo sapiens
gaagggatgtgtccggaagtcgc

SEQ ID NO: 20645 - DNA, 23 bp, Homo sapiens
agaagggatgtgtccggaagtcg

SEQ ID NO: 20646 - DNA, 23 bp, Homo sapiens
aagaagggatgtgtccggaagtc

SEQ ID NO: 20647 - DNA, 23 bp, Homo sapiens
gaagaagggatgtgtccggaagt

SEQ ID NO: 20648 - DNA, 23 bp, Homo sapiens
agaagaagggatgtgtccggaag

SEQ ID NO: 20649 - DNA, 23 bp, Homo sapiens
aagaagaagggatgtgtccggaa

SEQ ID NO: 20650 - DNA, 23 bp, Homo sapiens
aaagaagaagggatgtgtccgga

SEQ ID NO: 20651 - DNA, 23 bp, Homo sapiens
caaagaagaagggatgtgtccgg

SEQ ID NO: 20652 - DNA, 23 bp, Homo sapiens
ccaaagaagaagggatgtgtccg

SEQ ID NO: 20653 - DNA, 23 bp, Homo sapiens
gccaaagaagaagggatgtgtcc

SEQ ID NO: 20654 - DNA, 23 bp, Homo sapiens
ggccaaagaagaagggatgtgtc

SEQ ID NO: 20655 - DNA, 23 bp, Homo sapiens
aggccaaagaagaagggatgtgt

SEQ ID NO: 20656 - DNA, 23 bp, Homo sapiens
gaggccaaagaagaagggatgtg

SEQ ID NO: 20657 - DNA, 23 bp, Homo sapiens
cgaggccaaagaagaagggatgt

SEQ ID NO: 20658 - DNA, 23 bp, Homo sapiens
tcgaggccaaagaagaagggatg

SEQ ID NO: 20659 - DNA, 23 bp, Homo sapiens
gtcgaggccaaagaagaagggat

SEQ ID NO: 20660 - DNA, 23 bp, Homo sapiens
agtcgaggccaaagaagaaggga

SEQ ID NO: 20661 - DNA, 23 bp, Homo sapiens
cagtcgaggccaaagaagaaggg

SEQ ID NO: 20662 - DNA, 23 bp, Homo sapiens
ccagtcgaggccaaagaagaagg

SEQ ID NO: 20663 - DNA, 23 bp, Homo sapiens
cccagtcgaggccaaagaagaag

SEQ ID NO: 20664 - DNA, 23 bp, Homo sapiens
tcccagtcgaggccaaagaagaa

SEQ ID NO: 20665 - DNA, 23 bp, Homo sapiens
atcccagtcgaggccaaagaaga

SEQ ID NO: 20666 - DNA, 23 bp, Homo sapiens
catcccagtcgaggccaaagaag

SEQ ID NO: 20667 - DNA, 23 bp, Homo sapiens
ccatcccagtcgaggccaaagaa

SEQ ID NO: 20668 - DNA, 23 bp, Homo sapiens
accatcccagtcgaggccaaaga

SEQ ID NO: 20669 - DNA, 23 bp, Homo sapiens
gaccatcccagtcgaggccaaag

SEQ ID NO: 20670 - DNA, 23 bp, Homo sapiens
agaccatcccagtcgaggccaaa

SEQ ID NO: 20671 - DNA, 23 bp, Homo sapiens
gagaccatcccagtcgaggccaa

SEQ ID NO: 20672 - DNA, 23 bp, Homo sapiens
ggagaccatcccagtcgaggcca

SEQ ID NO: 20673 - DNA, 23 bp, Homo sapiens
cggagaccatcccagtcgaggcc

SEQ ID NO: 20674 - DNA, 23 bp, Homo sapiens
ccggagaccatcccagtcgaggc

SEQ ID NO: 20675 - DNA, 23 bp, Homo sapiens
cccggagaccatcccagtcgagg

SEQ ID NO: 20676 - DNA, 23 bp, Homo sapiens
tcccggagaccatcccagtcgag

SEQ ID NO: 20677 - DNA, 23 bp, Homo sapiens
gtcccggagaccatcccagtcga

SEQ ID NO: 20678 - DNA, 23 bp, Homo sapiens
tgtcccggagaccatcccagtcg

SEQ ID NO: 20679 - DNA, 23 bp, Homo sapiens
ctgtcccggagaccatcccagtc

SEQ ID NO: 20680 - DNA, 23 bp, Homo sapiens
gctgtcccggagaccatcccagt

SEQ ID NO: 20681 - DNA, 23 bp, Homo sapiens
cgctgtcccggagaccatcccag

SEQ ID NO: 20682 - DNA, 23 bp, Homo sapiens
acgctgtcccggagaccatccca

SEQ ID NO: 20683 - DNA, 23 bp, Homo sapiens
cacgctgtcccggagaccatccc

SEQ ID NO: 20684 - DNA, 23 bp, Homo sapiens
gcacgctgtcccggagaccatcc

SEQ ID NO: 20685 - DNA, 23 bp, Homo sapiens
ggcacgctgtcccggagaccatc

SEQ ID NO: 20686 - DNA, 23 bp, Homo sapiens
gggcacgctgtcccggagaccat

SEQ ID NO: 20687 - DNA, 23 bp, Homo sapiens
ggggcacgctgtcccggagacca

SEQ ID NO: 20688 - DNA, 23 bp, Homo sapiens
gggggcacgctgtcccggagacc

SEQ ID NO: 20689 - DNA, 23 bp, Homo sapiens
ggggggcacgctgtcccggagac

SEQ ID NO: 20690 - DNA, 23 bp, Homo sapiens
aggggggcacgctgtcccggaga

SEQ ID NO: 20691 - DNA, 23 bp, Homo sapiens
aaggggggcacgctgtcccggag

SEQ ID NO: 20692 - DNA, 23 bp, Homo sapiens
aaaggggggcacgctgtcccgga

SEQ ID NO: 20693 - DNA, 23 bp, Homo sapiens
taaaggggggcacgctgtcccgg

SEQ ID NO: 20694 - DNA, 23 bp, Homo sapiens
gtaaaggggggcacgctgtcccg

SEQ ID NO: 20695 - DNA, 23 bp, Homo sapiens
tgtaaaggggggcacgctgtccc

SEQ ID NO: 20696 - DNA, 23 bp, Homo sapiens
gtgtaaaggggggcacgctgtcc

SEQ ID NO: 20697 - DNA, 23 bp, Homo sapiens
ggtgtaaaggggggcacgctgtc

SEQ ID NO: 20698 - DNA, 23 bp, Homo sapiens
cggtgtaaaggggggcacgctgt

SEQ ID NO: 20699 - DNA, 23 bp, Homo sapiens
ccggtgtaaaggggggcacgctg

SEQ ID NO: 20700 - DNA, 23 bp, Homo sapiens
tccggtgtaaaggggggcacgct

SEQ ID NO: 20701 - DNA, 23 bp, Homo sapiens
atccggtgtaaaggggggcacgc

SEQ ID NO: 20702 - DNA, 23 bp, Homo sapiens
aatccggtgtaaaggggggcacg

SEQ ID NO: 20703 - DNA, 23 bp, Homo sapiens
aaatccggtgtaaaggggggcac

SEQ ID NO: 20704 - DNA, 23 bp, Homo sapiens
gaaatccggtgtaaaggggggca

SEQ ID NO: 20705 - DNA, 23 bp, Homo sapiens
cgaaatccggtgtaaaggggggc

SEQ ID NO: 20706 - DNA, 23 bp, Homo sapiens
tcgaaatccggtgtaaagggggg

SEQ ID NO: 20707 - DNA, 23 bp, Homo sapiens
ttcgaaatccggtgtaaaggggg

SEQ ID NO: 20708 - DNA, 23 bp, Homo sapiens
cttcgaaatccggtgtaaagggg

SEQ ID NO: 20709 - DNA, 23 bp, Homo sapiens
ccttcgaaatccggtgtaaaggg

SEQ ID NO: 20710 - DNA, 23 bp, Homo sapiens
accttcgaaatccggtgtaaagg

SEQ ID NO: 20711 - DNA, 23 bp, Homo sapiens
caccttcgaaatccggtgtaaag

SEQ ID NO: 20712 - DNA, 23 bp, Homo sapiens
gcaccttcgaaatccggtgtaaa

SEQ ID NO: 20713 - DNA, 23 bp, Homo sapiens
ggcaccttcgaaatccggtgtaa

SEQ ID NO: 20714 - DNA, 23 bp, Homo sapiens
tggcaccttcgaaatccggtgta

SEQ ID NO: 20715 - DNA, 23 bp, Homo sapiens
gtggcaccttcgaaatccggtgt

SEQ ID NO: 20716 - DNA, 23 bp, Homo sapiens
ggtggcaccttcgaaatccggtg

SEQ ID NO: 20717 - DNA, 23 bp, Homo sapiens
cggtggcaccttcgaaatccggt

SEQ ID NO: 20718 - DNA, 23 bp, Homo sapiens
tcggtggcaccttcgaaatccgg

SEQ ID NO: 20719 - DNA, 23 bp, Homo sapiens
gtcggtggcaccttcgaaatccg

SEQ ID NO: 20720 - DNA, 23 bp, Homo sapiens
tgtcggtggcaccttcgaaatcc

SEQ ID NO: 20721 - DNA, 23 bp, Homo sapiens
gtgtcggtggcaccttcgaaatc

SEQ ID NO: 20722 - DNA, 23 bp, Homo sapiens
tgtgtcggtggcaccttcgaaat

SEQ ID NO: 20723 - DNA, 23 bp, Homo sapiens
atgtgtcggtggcaccttcgaaa

SEQ ID NO: 20724 - DNA, 23 bp, Homo sapiens
catgtgtcggtggcaccttcgaa

SEQ ID NO: 20725 - DNA, 23 bp, Homo sapiens
gcatgtgtcggtggcaccttcga

SEQ ID NO: 20726 - DNA, 23 bp, Homo sapiens
tgcatgtgtcggtggcaccttcg

SEQ ID NO: 20727 - DNA, 23 bp, Homo sapiens
ttgcatgtgtcggtggcaccttc

SEQ ID NO: 20728 - DNA, 23 bp, Homo sapiens
gttgcatgtgtcggtggcacctt

SEQ ID NO: 20729 - DNA, 23 bp, Homo sapiens
agttgcatgtgtcggtggcacct

SEQ ID NO: 20730 - DNA, 23 bp, Homo sapiens
aagttgcatgtgtcggtggcacc

SEQ ID NO: 20731 - DNA, 23 bp, Homo sapiens
gaagttgcatgtgtcggtggcac

SEQ ID NO: 20732 - DNA, 23 bp, Homo sapiens
cgaagttgcatgtgtcggtggca

SEQ ID NO: 20733 - DNA, 23 bp, Homo sapiens
tcgaagttgcatgtgtcggtggc

SEQ ID NO: 20734 - DNA, 23 bp, Homo sapiens
gtcgaagttgcatgtgtcggtgg

SEQ ID NO: 20735 - DNA, 23 bp, Homo sapiens
agtcgaagttgcatgtgtcggtg

SEQ ID NO: 20736 - DNA, 23 bp, Homo sapiens
aagtcgaagttgcatgtgtcggt

SEQ ID NO: 20737 - DNA, 23 bp, Homo sapiens
caagtcgaagttgcatgtgtcgg

SEQ ID NO: 20738 - DNA, 23 bp, Homo sapiens
ccaagtcgaagttgcatgtgtcg

SEQ ID NO: 20739 - DNA, 23 bp, Homo sapiens
accaagtcgaagttgcatgtgtc

SEQ ID NO: 20740 - DNA, 23 bp, Homo sapiens
caccaagtcgaagttgcatgtgt

SEQ ID NO: 20741 - DNA, 23 bp, Homo sapiens
ccaccaagtcgaagttgcatgtg

SEQ ID NO: 20742 - DNA, 23 bp, Homo sapiens
tccaccaagtcgaagttgcatgt

SEQ ID NO: 20743 - DNA, 23 bp, Homo sapiens
ctccaccaagtcgaagttgcatg

SEQ ID NO: 20744 - DNA, 23 bp, Homo sapiens
cctccaccaagtcgaagttgcat

SEQ ID NO: 20745 - DNA, 23 bp, Homo sapiens
tcctccaccaagtcgaagttgca

SEQ ID NO: 20746 - DNA, 23 bp, Homo sapiens
gtcctccaccaagtcgaagttgc

SEQ ID NO: 20747 - DNA, 23 bp, Homo sapiens
cgtcctccaccaagtcgaagttg

SEQ ID NO: 20748 - DNA, 23 bp, Homo sapiens
ccgtcctccaccaagtcgaagtt

SEQ ID NO: 20749 - DNA, 23 bp, Homo sapiens
cccgtcctccaccaagtcgaagt

SEQ ID NO: 20750 - DNA, 23 bp, Homo sapiens
gcccgtcctccaccaagtcgaag

SEQ ID NO: 20751 - DNA, 23 bp, Homo sapiens
agcccgtcctccaccaagtcgaa

SEQ ID NO: 20752 - DNA, 23 bp, Homo sapiens
gagcccgtcctccaccaagtcga

SEQ ID NO: 20753 - DNA, 23 bp, Homo sapiens
tgagcccgtcctccaccaagtcg

SEQ ID NO: 20754 - DNA, 23 bp, Homo sapiens
gtgagcccgtcctccaccaagtc

SEQ ID NO: 20755 - DNA, 23 bp, Homo sapiens
agtgagcccgtcctccaccaagt

SEQ ID NO: 20756 - DNA, 23 bp, Homo sapiens
cagtgagcccgtcctccaccaag

SEQ ID NO: 20757 - DNA, 23 bp, Homo sapiens
gcagtgagcccgtcctccaccaa

SEQ ID NO: 20758 - DNA, 23 bp, Homo sapiens
ggcagtgagcccgtcctccacca

SEQ ID NO: 20759 - DNA, 23 bp, Homo sapiens
tggcagtgagcccgtcctccacc

SEQ ID NO: 20760 - DNA, 23 bp, Homo sapiens
atggcagtgagcccgtcctccac

SEQ ID NO: 20761 - DNA, 23 bp, Homo sapiens
catggcagtgagcccgtcctcca

SEQ ID NO: 20762 - DNA, 23 bp, Homo sapiens
ccatggcagtgagcccgtcctcc

SEQ ID NO: 20763 - DNA, 23 bp, Homo sapiens
tccatggcagtgagcccgtcctc

SEQ ID NO: 20764 - DNA, 23 bp, Homo sapiens
ctccatggcagtgagcccgtcct

SEQ ID NO: 20765 - DNA, 23 bp, Homo sapiens
tctccatggcagtgagcccgtcc

SEQ ID NO: 20766 - DNA, 23 bp, Homo sapiens
gtctccatggcagtgagcccgtc

SEQ ID NO: 20767 - DNA, 23 bp, Homo sapiens
tgtctccatggcagtgagcccgt

SEQ ID NO: 20768 - DNA, 23 bp, Homo sapiens
gtgtctccatggcagtgagcccg

SEQ ID NO: 20769 - DNA, 23 bp, Homo sapiens
agtgtctccatggcagtgagccc

SEQ ID NO: 20770 - DNA, 23 bp, Homo sapiens
cagtgtctccatggcagtgagcc

SEQ ID NO: 20771 - DNA, 23 bp, Homo sapiens
acagtgtctccatggcagtgagc

SEQ ID NO: 20772 - DNA, 23 bp, Homo sapiens
gacagtgtctccatggcagtgag

SEQ ID NO: 20773 - DNA, 23 bp, Homo sapiens
cgacagtgtctccatggcagtga

SEQ ID NO: 20774 - DNA, 23 bp, Homo sapiens
ccgacagtgtctccatggcagtg

SEQ ID NO: 20775 - DNA, 23 bp, Homo sapiens
tccgacagtgtctccatggcagt

SEQ ID NO: 20776 - DNA, 23 bp, Homo sapiens
gtccgacagtgtctccatggcag

SEQ ID NO: 20777 - DNA, 23 bp, Homo sapiens
tgtccgacagtgtctccatggca

SEQ ID NO: 20778 - DNA, 23 bp, Homo sapiens
atgtccgacagtgtctccatggc

SEQ ID NO: 20779 - DNA, 23 bp, Homo sapiens
aatgtccgacagtgtctccatgg

SEQ ID NO: 20780 - DNA, 23 bp, Homo sapiens
gaatgtccgacagtgtctccatg

SEQ ID NO: 20781 - DNA, 23 bp, Homo sapiens
cgaatgtccgacagtgtctccat

SEQ ID NO: 20782 - DNA, 23 bp, Homo sapiens
ccgaatgtccgacagtgtctcca

SEQ ID NO: 20783 - DNA, 23 bp, Homo sapiens
cccgaatgtccgacagtgtctcc

SEQ ID NO: 20784 - DNA, 23 bp, Homo sapiens
tcccgaatgtccgacagtgtctc

SEQ ID NO: 20785 - DNA, 23 bp, Homo sapiens
ttcccgaatgtccgacagtgtct

SEQ ID NO: 20786 - DNA, 23 bp, Homo sapiens
cttcccgaatgtccgacagtgtc

SEQ ID NO: 20787 - DNA, 23 bp, Homo sapiens
ccttcccgaatgtccgacagtgt

SEQ ID NO: 20788 - DNA, 23 bp, Homo sapiens
accttcccgaatgtccgacagtg

SEQ ID NO: 20789 - DNA, 23 bp, Homo sapiens
caccttcccgaatgtccgacagt

SEQ ID NO: 20790 - DNA, 23 bp, Homo sapiens
gcaccttcccgaatgtccgacag

SEQ ID NO: 20791 - DNA, 23 bp, Homo sapiens
cgcaccttcccgaatgtccgaca

SEQ ID NO: 20792 - DNA, 23 bp, Homo sapiens
gcgcaccttcccgaatgtccgac

SEQ ID NO: 20793 - DNA, 23 bp, Homo sapiens
ggcgcaccttcccgaatgtccga

SEQ ID NO: 20794 - DNA, 23 bp, Homo sapiens
cggcgcaccttcccgaatgtccg

SEQ ID NO: 20795 - DNA, 23 bp, Homo sapiens
gcggcgcaccttcccgaatgtcc

SEQ ID NO: 20796 - DNA, 23 bp, Homo sapiens
agcggcgcaccttcccgaatgtc

SEQ ID NO: 20797 - DNA, 23 bp, Homo sapiens
tagcggcgcaccttcccgaatgt

SEQ ID NO: 20798 - DNA, 23 bp, Homo sapiens
ctagcggcgcaccttcccgaatg

SEQ ID NO: 20799 - DNA, 23 bp, Homo sapiens
cctagcggcgcaccttcccgaat

SEQ ID NO: 20800 - DNA, 23 bp, Homo sapiens
ccctagcggcgcaccttcccgaa

SEQ ID NO: 20801 - DNA, 23 bp, Homo sapiens
cccctagcggcgcaccttcccga

SEQ ID NO: 20802 - DNA, 23 bp, Homo sapiens
acccctagcggcgcaccttcccg

SEQ ID NO: 20803 - DNA, 23 bp, Homo sapiens
gacccctagcggcgcaccttccc

SEQ ID NO: 20804 - DNA, 23 bp, Homo sapiens
ggacccctagcggcgcaccttcc

SEQ ID NO: 20805 - DNA, 23 bp, Homo sapiens
tggacccctagcggcgcaccttc

SEQ ID NO: 20806 - DNA, 23 bp, Homo sapiens
gtggacccctagcggcgcacctt

SEQ ID NO: 20807 - DNA, 23 bp, Homo sapiens
ggtggacccctagcggcgcacct

SEQ ID NO: 20808 - DNA, 23 bp, Homo sapiens
aggtggacccctagcggcgcacc

SEQ ID NO: 20809 - DNA, 23 bp, Homo sapiens
caggtggacccctagcggcgcac

SEQ ID NO: 20810 - DNA, 23 bp, Homo sapiens
gcaggtggacccctagcggcgca

SEQ ID NO: 20811 - DNA, 23 bp, Homo sapiens
ggcaggtggacccctagcggcgc

SEQ ID NO: 20812 - DNA, 23 bp, Homo sapiens
aggcaggtggacccctagcggcg

SEQ ID NO: 20813 - DNA, 23 bp, Homo sapiens
aaggcaggtggacccctagcggc

SEQ ID NO: 20814 - DNA, 23 bp, Homo sapiens
aaaggcaggtggacccctagcgg

SEQ ID NO: 20815 - DNA, 23 bp, Homo sapiens
aaaaggcaggtggacccctagcg

SEQ ID NO: 20816 - DNA, 23 bp, Homo sapiens
caaaaggcaggtggacccctagc

SEQ ID NO: 20817 - DNA, 23 bp, Homo sapiens
acaaaaggcaggtggacccctag

SEQ ID NO: 20818 - DNA, 23 bp, Homo sapiens
cacaaaaggcaggtggaccccta

SEQ ID NO: 20819 - DNA, 23 bp, Homo sapiens
ccacaaaaggcaggtggacccct

SEQ ID NO: 20820 - DNA, 23 bp, Homo sapiens
cccacaaaaggcaggtggacccc

SEQ ID NO: 20821 - DNA, 23 bp, Homo sapiens
gcccacaaaaggcaggtggaccc

SEQ ID NO: 20822 - DNA, 23 bp, Homo sapiens
agcccacaaaaggcaggtggacc

SEQ ID NO: 20823 - DNA, 23 bp, Homo sapiens
tagcccacaaaaggcaggtggac

SEQ ID NO: 20824 - DNA, 23 bp, Homo sapiens
gtagcccacaaaaggcaggtgga

SEQ ID NO: 20825 - DNA, 23 bp, Homo sapiens
agtagcccacaaaaggcaggtgg

SEQ ID NO: 20826 - DNA, 23 bp, Homo sapiens
gagtagcccacaaaaggcaggtg

SEQ ID NO: 20827 - DNA, 23 bp, Homo sapiens
ggagtagcccacaaaaggcaggt

SEQ ID NO: 20828 - DNA, 23 bp, Homo sapiens
aggagtagcccacaaaaggcagg

SEQ ID NO: 20829 - DNA, 23 bp, Homo sapiens
taggagtagcccacaaaaggcag

SEQ ID NO: 20830 - DNA, 23 bp, Homo sapiens
gtaggagtagcccacaaaaggca

SEQ ID NO: 20831 - DNA, 23 bp, Homo sapiens
agtaggagtagcccacaaaaggc

SEQ ID NO: 20832 - DNA, 23 bp, Homo sapiens
gagtaggagtagcccacaaaagg

SEQ ID NO: 20833 - DNA, 23 bp, Homo sapiens
ggagtaggagtagcccacaaaag

SEQ ID NO: 20834 - DNA, 23 bp, Homo sapiens
aggagtaggagtagcccacaaaa

SEQ ID NO: 20835 - DNA, 23 bp, Homo sapiens
caggagtaggagtagcccacaaa

SEQ ID NO: 20836 - DNA, 23 bp, Homo sapiens
gcaggagtaggagtagcccacaa

SEQ ID NO: 20837 - DNA, 23 bp, Homo sapiens
tgcaggagtaggagtagcccaca

SEQ ID NO: 20838 - DNA, 23 bp, Homo sapiens
atgcaggagtaggagtagcccac

SEQ ID NO: 20839 - DNA, 23 bp, Homo sapiens
catgcaggagtaggagtagccca

SEQ ID NO: 20840 - DNA, 23 bp, Homo sapiens
ccatgcaggagtaggagtagccc

SEQ ID NO: 20841 - DNA, 23 bp, Homo sapiens
gccatgcaggagtaggagtagcc

SEQ ID NO: 20842 - DNA, 23 bp, Homo sapiens
ggccatgcaggagtaggagtagc

SEQ ID NO: 20843 - DNA, 23 bp, Homo sapiens
gggccatgcaggagtaggagtag

SEQ ID NO: 20844 - DNA, 23 bp, Homo sapiens
agggccatgcaggagtaggagta

SEQ ID NO: 20845 - DNA, 23 bp, Homo sapiens
gagggccatgcaggagtaggagt

SEQ ID NO: 20846 - DNA, 23 bp, Homo sapiens
tgagggccatgcaggagtaggag

SEQ ID NO: 20847 - DNA, 23 bp, Homo sapiens
ctgagggccatgcaggagtagga

SEQ ID NO: 20848 - DNA, 23 bp, Homo sapiens
cctgagggccatgcaggagtagg

SEQ ID NO: 20849 - DNA, 23 bp, Homo sapiens
ccctgagggccatgcaggagtag

SEQ ID NO: 20850 - DNA, 23 bp, Homo sapiens
tccctgagggccatgcaggagta

SEQ ID NO: 20851 - DNA, 23 bp, Homo sapiens
gtccctgagggccatgcaggagt

SEQ ID NO: 20852 - DNA, 23 bp, Homo sapiens
tgtccctgagggccatgcaggag

SEQ ID NO: 20853 - DNA, 23 bp, Homo sapiens
ctgtccctgagggccatgcagga

SEQ ID NO: 20854 - DNA, 23 bp, Homo sapiens
actgtccctgagggccatgcagg

SEQ ID NO: 20855 - DNA, 23 bp, Homo sapiens
cactgtccctgagggccatgcag

SEQ ID NO: 20856 - DNA, 23 bp, Homo sapiens
tcactgtccctgagggccatgca

SEQ ID NO: 20857 - DNA, 23 bp, Homo sapiens
ctcactgtccctgagggccatgc

SEQ ID NO: 20858 - DNA, 23 bp, Homo sapiens
cctcactgtccctgagggccatg

SEQ ID NO: 20859 - DNA, 23 bp, Homo sapiens
acctcactgtccctgagggccat

SEQ ID NO: 20860 - DNA, 23 bp, Homo sapiens
gacctcactgtccctgagggcca

SEQ ID NO: 20861 - DNA, 23 bp, Homo sapiens
ggacctcactgtccctgagggcc

SEQ ID NO: 20862 - DNA, 23 bp, Homo sapiens
gggacctcactgtccctgagggc

SEQ ID NO: 20863 - DNA, 23 bp, Homo sapiens
tgggacctcactgtccctgaggg

SEQ ID NO: 20864 - DNA, 23 bp, Homo sapiens
ctgggacctcactgtccctgagg

SEQ ID NO: 20865 - DNA, 23 bp, Homo sapiens
cctgggacctcactgtccctgag

SEQ ID NO: 20866 - DNA, 23 bp, Homo sapiens
gcctgggacctcactgtccctga

SEQ ID NO: 20867 - DNA, 23 bp, Homo sapiens
ggcctgggacctcactgtccctg

SEQ ID NO: 20868 - DNA, 23 bp, Homo sapiens
gggcctgggacctcactgtccct

SEQ ID NO: 20869 - DNA, 23 bp, Homo sapiens
ggggcctgggacctcactgtccc

SEQ ID NO: 20870 - DNA, 23 bp, Homo sapiens
tggggcctgggacctcactgtcc

SEQ ID NO: 20871 - DNA, 23 bp, Homo sapiens
gtggggcctgggacctcactgtc

SEQ ID NO: 20872 - DNA, 23 bp, Homo sapiens
tgtggggcctgggacctcactgt

SEQ ID NO: 20873 - DNA, 23 bp, Homo sapiens
gtgtggggcctgggacctcactg

SEQ ID NO: 20874 - DNA, 23 bp, Homo sapiens
ggtgtggggcctgggacctcact

SEQ ID NO: 20875 - DNA, 23 bp, Homo sapiens
gggtgtggggcctgggacctcac

SEQ ID NO: 20876 - DNA, 23 bp, Homo sapiens
tgggtgtggggcctgggacctca

SEQ ID NO: 20877 - DNA, 23 bp, Homo sapiens
atgggtgtggggcctgggacctc

SEQ ID NO: 20878 - DNA, 23 bp, Homo sapiens
catgggtgtggggcctgggacct

SEQ ID NO: 20879 - DNA, 23 bp, Homo sapiens
ccatgggtgtggggcctgggacc

SEQ ID NO: 20880 - DNA, 23 bp, Homo sapiens
tccatgggtgtggggcctgggac

SEQ ID NO: 20881 - DNA, 23 bp, Homo sapiens
ttccatgggtgtggggcctggga

SEQ ID NO: 20882 - DNA, 23 bp, Homo sapiens
gttccatgggtgtggggcctggg

SEQ ID NO: 20883 - DNA, 23 bp, Homo sapiens
agttccatgggtgtggggcctgg

SEQ ID NO: 20884 - DNA, 23 bp, Homo sapiens
cagttccatgggtgtggggcctg

SEQ ID NO: 20885 - DNA, 23 bp, Homo sapiens
ccagttccatgggtgtggggcct

SEQ ID NO: 20886 - DNA, 23 bp, Homo sapiens
tccagttccatgggtgtggggcc

SEQ ID NO: 20887 - DNA, 23 bp, Homo sapiens
ctccagttccatgggtgtggggc

SEQ ID NO: 20888 - DNA, 23 bp, Homo sapiens
cctccagttccatgggtgtgggg

SEQ ID NO: 20889 - DNA, 23 bp, Homo sapiens
gcctccagttccatgggtgtggg

SEQ ID NO: 20890 - DNA, 23 bp, Homo sapiens
ggcctccagttccatgggtgtgg

SEQ ID NO: 20891 - DNA, 23 bp, Homo sapiens
cggcctccagttccatgggtgtg

SEQ ID NO: 20892 - DNA, 23 bp, Homo sapiens
tcggcctccagttccatgggtgt

SEQ ID NO: 20893 - DNA, 23 bp, Homo sapiens
ctcggcctccagttccatgggtg

SEQ ID NO: 20894 - DNA, 23 bp, Homo sapiens
gctcggcctccagttccatgggt

SEQ ID NO: 20895 - DNA, 23 bp, Homo sapiens
tgctcggcctccagttccatggg

SEQ ID NO: 20896 - DNA, 23 bp, Homo sapiens
ctgctcggcctccagttccatgg

SEQ ID NO: 20897 - DNA, 23 bp, Homo sapiens
gctgctcggcctccagttccatg

SEQ ID NO: 20898 - DNA, 23 bp, Homo sapiens
agctgctcggcctccagttccat

SEQ ID NO: 20899 - DNA, 23 bp, Homo sapiens
cagctgctcggcctccagttcca

SEQ ID NO: 20900 - DNA, 23 bp, Homo sapiens
gcagctgctcggcctccagttcc

SEQ ID NO: 20901 - DNA, 23 bp, Homo sapiens
agcagctgctcggcctccagttc

SEQ ID NO: 20902 - DNA, 23 bp, Homo sapiens
aagcagctgctcggcctccagtt

SEQ ID NO: 20903 - DNA, 23 bp, Homo sapiens
caagcagctgctcggcctccagt

SEQ ID NO: 20904 - DNA, 23 bp, Homo sapiens
tcaagcagctgctcggcctccag

SEQ ID NO: 20905 - DNA, 23 bp, Homo sapiens
ctcaagcagctgctcggcctcca

SEQ ID NO: 20906 - DNA, 23 bp, Homo sapiens
gctcaagcagctgctcggcctcc

SEQ ID NO: 20907 - DNA, 23 bp, Homo sapiens
ggctcaagcagctgctcggcctc

SEQ ID NO: 20908 - DNA, 23 bp, Homo sapiens
tggctcaagcagctgctcggcct

SEQ ID NO: 20909 - DNA, 23 bp, Homo sapiens
gtggctcaagcagctgctcggcc

SEQ ID NO: 20910 - DNA, 23 bp, Homo sapiens
tgtggctcaagcagctgctcggc

SEQ ID NO: 20911 - DNA, 23 bp, Homo sapiens
gtgtggctcaagcagctgctcgg

SEQ ID NO: 20912 - DNA, 23 bp, Homo sapiens
cgtgtggctcaagcagctgctcg

SEQ ID NO: 20913 - DNA, 23 bp, Homo sapiens
acgtgtggctcaagcagctgctc

SEQ ID NO: 20914 - DNA, 23 bp, Homo sapiens
cacgtgtggctcaagcagctgct

SEQ ID NO: 20915 - DNA, 23 bp, Homo sapiens
gcacgtgtggctcaagcagctgc

SEQ ID NO: 20916 - DNA, 23 bp, Homo sapiens
tgcacgtgtggctcaagcagctg

SEQ ID NO: 20917 - DNA, 23 bp, Homo sapiens
ttgcacgtgtggctcaagcagct

SEQ ID NO: 20918 - DNA, 23 bp, Homo sapiens
cttgcacgtgtggctcaagcagc

SEQ ID NO: 20919 - DNA, 23 bp, Homo sapiens
gcttgcacgtgtggctcaagcag

SEQ ID NO: 20920 - DNA, 23 bp, Homo sapiens
cgcttgcacgtgtggctcaagca

SEQ ID NO: 20921 - DNA, 23 bp, Homo sapiens
gcgcttgcacgtgtggctcaagc

SEQ ID NO: 20922 - DNA, 23 bp, Homo sapiens
ggcgcttgcacgtgtggctcaag

SEQ ID NO: 20923 - DNA, 23 bp, Homo sapiens
gggcgcttgcacgtgtggctcaa

SEQ ID NO: 20924 - DNA, 23 bp, Homo sapiens
tgggcgcttgcacgtgtggctca

SEQ ID NO: 20925 - DNA, 23 bp, Homo sapiens
ctgggcgcttgcacgtgtggctc

SEQ ID NO: 20926 - DNA, 23 bp, Homo sapiens
gctgggcgcttgcacgtgtggct

SEQ ID NO: 20927 - DNA, 23 bp, Homo sapiens
ggctgggcgcttgcacgtgtggc

SEQ ID NO: 20928 - DNA, 23 bp, Homo sapiens
aggctgggcgcttgcacgtgtgg

SEQ ID NO: 20929 - DNA, 23 bp, Homo sapiens
caggctgggcgcttgcacgtgtg

SEQ ID NO: 20930 - DNA, 23 bp, Homo sapiens
ccaggctgggcgcttgcacgtgt

SEQ ID NO: 20931 - DNA, 23 bp, Homo sapiens
tccaggctgggcgcttgcacgtg

SEQ ID NO: 20932 - DNA, 23 bp, Homo sapiens
ctccaggctgggcgcttgcacgt

SEQ ID NO: 20933 - DNA, 23 bp, Homo sapiens
gctccaggctgggcgcttgcacg

SEQ ID NO: 20934 - DNA, 23 bp, Homo sapiens
ggctccaggctgggcgcttgcac

SEQ ID NO: 20935 - DNA, 23 bp, Homo sapiens
gggctccaggctgggcgcttgca

SEQ ID NO: 20936 - DNA, 23 bp, Homo sapiens
agggctccaggctgggcgcttgc

SEQ ID NO: 20937 - DNA, 23 bp, Homo sapiens
gagggctccaggctgggcgcttg

SEQ ID NO: 20938 - DNA, 23 bp, Homo sapiens
cgagggctccaggctgggcgctt

SEQ ID NO: 20939 - DNA, 23 bp, Homo sapiens
ccgagggctccaggctgggcgct

SEQ ID NO: 20940 - DNA, 23 bp, Homo sapiens
accgagggctccaggctgggcgc

SEQ ID NO: 20941 - DNA, 23 bp, Homo sapiens
caccgagggctccaggctgggcg

SEQ ID NO: 20942 - DNA, 23 bp, Homo sapiens
acaccgagggctccaggctgggc

SEQ ID NO: 20943 - DNA, 23 bp, Homo sapiens
gacaccgagggctccaggctggg

SEQ ID NO: 20944 - DNA, 23 bp, Homo sapiens
ggacaccgagggctccaggctgg

SEQ ID NO: 20945 - DNA, 23 bp, Homo sapiens
gggacaccgagggctccaggctg

SEQ ID NO: 20946 - DNA, 23 bp, Homo sapiens
ggggacaccgagggctccaggct

SEQ ID NO: 20947 - DNA, 23 bp, Homo sapiens
tggggacaccgagggctccaggc

SEQ ID NO: 20948 - DNA, 23 bp, Homo sapiens
gtggggacaccgagggctccagg

SEQ ID NO: 20949 - DNA, 23 bp, Homo sapiens
tgtggggacaccgagggctccag

SEQ ID NO: 20950 - DNA, 23 bp, Homo sapiens
ctgtggggacaccgagggctcca

SEQ ID NO: 20951 - DNA, 23 bp, Homo sapiens
cctgtggggacaccgagggctcc

SEQ ID NO: 20952 - DNA, 23 bp, Homo sapiens
tcctgtggggacaccgagggctc

SEQ ID NO: 20953 - DNA, 23 bp, Homo sapiens
atcctgtggggacaccgagggct

SEQ ID NO: 20954 - DNA, 23 bp, Homo sapiens
catcctgtggggacaccgagggc

SEQ ID NO: 20955 - DNA, 23 bp, Homo sapiens
tcatcctgtggggacaccgaggg

SEQ ID NO: 20956 - DNA, 23 bp, Homo sapiens
ttcatcctgtggggacaccgagg

SEQ ID NO: 20957 - DNA, 23 bp, Homo sapiens
tttcatcctgtggggacaccgag

SEQ ID NO: 20958 - DNA, 23 bp, Homo sapiens
gtttcatcctgtggggacaccga

SEQ ID NO: 20959 - DNA, 23 bp, Homo sapiens
tgtttcatcctgtggggacaccg

SEQ ID NO: 20960 - DNA, 23 bp, Homo sapiens
ctgtttcatcctgtggggacacc

SEQ ID NO: 20961 - DNA, 23 bp, Homo sapiens
gctgtttcatcctgtggggacac

SEQ ID NO: 20962 - DNA, 23 bp, Homo sapiens
agctgtttcatcctgtggggaca

SEQ ID NO: 20963 - DNA, 23 bp, Homo sapiens
cagctgtttcatcctgtggggac

SEQ ID NO: 20964 - DNA, 23 bp, Homo sapiens
tcagctgtttcatcctgtgggga

SEQ ID NO: 20965 - DNA, 23 bp, Homo sapiens
ttcagctgtttcatcctgtgggg

SEQ ID NO: 20966 - DNA, 23 bp, Homo sapiens
cttcagctgtttcatcctgtggg

SEQ ID NO: 20967 - DNA, 23 bp, Homo sapiens
acttcagctgtttcatcctgtgg

SEQ ID NO: 20968 - DNA, 23 bp, Homo sapiens
cacttcagctgtttcatcctgtg

SEQ ID NO: 20969 - DNA, 23 bp, Homo sapiens
ccacttcagctgtttcatcctgt

SEQ ID NO: 20970 - DNA, 23 bp, Homo sapiens
gccacttcagctgtttcatcctg

SEQ ID NO: 20971 - DNA, 23 bp, Homo sapiens
tgccacttcagctgtttcatcct

SEQ ID NO: 20972 - DNA, 23 bp, Homo sapiens
ctgccacttcagctgtttcatcc

SEQ ID NO: 20973 - DNA, 23 bp, Homo sapiens
actgccacttcagctgtttcatc

SEQ ID NO: 20974 - DNA, 23 bp, Homo sapiens
aactgccacttcagctgtttcat

SEQ ID NO: 20975 - DNA, 23 bp, Homo sapiens
gaactgccacttcagctgtttca

SEQ ID NO: 20976 - DNA, 23 bp, Homo sapiens
ggaactgccacttcagctgtttc

SEQ ID NO: 20977 - DNA, 23 bp, Homo sapiens
tggaactgccacttcagctgttt

SEQ ID NO: 20978 - DNA, 23 bp, Homo sapiens
ctggaactgccacttcagctgtt

SEQ ID NO: 20979 - DNA, 23 bp, Homo sapiens
gctggaactgccacttcagctgt

SEQ ID NO: 20980 - DNA, 23 bp, Homo sapiens
cgctggaactgccacttcagctg

SEQ ID NO: 20981 - DNA, 23 bp, Homo sapiens
ccgctggaactgccacttcagct

SEQ ID NO: 20982 - DNA, 23 bp, Homo sapiens
gccgctggaactgccacttcagc

SEQ ID NO: 20983 - DNA, 23 bp, Homo sapiens
agccgctggaactgccacttcag

SEQ ID NO: 20984 - DNA, 23 bp, Homo sapiens
cagccgctggaactgccacttca

SEQ ID NO: 20985 - DNA, 23 bp, Homo sapiens
acagccgctggaactgccacttc

SEQ ID NO: 20986 - DNA, 23 bp, Homo sapiens
gacagccgctggaactgccactt

SEQ ID NO: 20987 - DNA, 23 bp, Homo sapiens
ggacagccgctggaactgccact

SEQ ID NO: 20988 - DNA, 23 bp, Homo sapiens
gggacagccgctggaactgccac

SEQ ID NO: 20989 - DNA, 23 bp, Homo sapiens
agggacagccgctggaactgcca

SEQ ID NO: 20990 - DNA, 23 bp, Homo sapiens
cagggacagccgctggaactgcc

SEQ ID NO: 20991 - DNA, 23 bp, Homo sapiens
gcagggacagccgctggaactgc

SEQ ID NO: 20992 - DNA, 23 bp, Homo sapiens
cgcagggacagccgctggaactg

SEQ ID NO: 20993 - DNA, 23 bp, Homo sapiens
ccgcagggacagccgctggaact

SEQ ID NO: 20994 - DNA, 23 bp, Homo sapiens
gccgcagggacagccgctggaac

SEQ ID NO: 20995 - DNA, 23 bp, Homo sapiens
tgccgcagggacagccgctggaa

SEQ ID NO: 20996 - DNA, 23 bp, Homo sapiens
ctgccgcagggacagccgctgga

SEQ ID NO: 20997 - DNA, 23 bp, Homo sapiens
tctgccgcagggacagccgctgg

SEQ ID NO: 20998 - DNA, 23 bp, Homo sapiens
ctctgccgcagggacagccgctg

SEQ ID NO: 20999 - DNA, 23 bp, Homo sapiens
cctctgccgcagggacagccgct

SEQ ID NO: 21000 - DNA, 23 bp, Homo sapiens
gcctctgccgcagggacagccgc

SEQ ID NO: 21001 - DNA, 23 bp, Homo sapiens
agcctctgccgcagggacagccg

SEQ ID NO: 21002 - DNA, 23 bp, Homo sapiens
cagcctctgccgcagggacagcc

SEQ ID NO: 21003 - DNA, 23 bp, Homo sapiens
tcagcctctgccgcagggacagc

SEQ ID NO: 21004 - DNA, 23 bp, Homo sapiens
ctcagcctctgccgcagggacag

SEQ ID NO: 21005 - DNA, 23 bp, Homo sapiens
cctcagcctctgccgcagggaca

SEQ ID NO: 21006 - DNA, 23 bp, Homo sapiens
gcctcagcctctgccgcagggac

SEQ ID NO: 21007 - DNA, 23 bp, Homo sapiens
ggcctcagcctctgccgcaggga

SEQ ID NO: 21008 - DNA, 23 bp, Homo sapiens
cggcctcagcctctgccgcaggg

SEQ ID NO: 21009 - DNA, 23 bp, Homo sapiens
tcggcctcagcctctgccgcagg

SEQ ID NO: 21010 - DNA, 23 bp, Homo sapiens
ctcggcctcagcctctgccgcag

SEQ ID NO: 21011 - DNA, 23 bp, Homo sapiens
cctcggcctcagcctctgccgca

SEQ ID NO: 21012 - DNA, 23 bp, Homo sapiens
acctcggcctcagcctctgccgc

SEQ ID NO: 21013 - DNA, 23 bp, Homo sapiens
cacctcggcctcagcctctgccg

SEQ ID NO: 21014 - DNA, 23 bp, Homo sapiens
tcacctcggcctcagcctctgcc

SEQ ID NO: 21015 - DNA, 23 bp, Homo sapiens
gtcacctcggcctcagcctctgc

SEQ ID NO: 21016 - DNA, 23 bp, Homo sapiens
cgtcacctcggcctcagcctctg

SEQ ID NO: 21017 - DNA, 23 bp, Homo sapiens
gcgtcacctcggcctcagcctct

SEQ ID NO: 21018 - DNA, 23 bp, Homo sapiens
agcgtcacctcggcctcagcctc

SEQ ID NO: 21019 - DNA, 23 bp, Homo sapiens
cagcgtcacctcggcctcagcct

SEQ ID NO: 21020 - DNA, 23 bp, Homo sapiens
gcagcgtcacctcggcctcagcc

SEQ ID NO: 21021 - DNA, 23 bp, Homo sapiens
cgcagcgtcacctcggcctcagc

SEQ ID NO: 21022 - DNA, 23 bp, Homo sapiens
ccgcagcgtcacctcggcctcag

SEQ ID NO: 21023 - DNA, 23 bp, Homo sapiens
cccgcagcgtcacctcggcctca

SEQ ID NO: 21024 - DNA, 23 bp, Homo sapiens
tcccgcagcgtcacctcggcctc

SEQ ID NO: 21025 - DNA, 23 bp, Homo sapiens
ctcccgcagcgtcacctcggcct

SEQ ID NO: 21026 - DNA, 23 bp, Homo sapiens
gctcccgcagcgtcacctcggcc

SEQ ID NO: 21027 - DNA, 23 bp, Homo sapiens
agctcccgcagcgtcacctcggc

SEQ ID NO: 21028 - DNA, 23 bp, Homo sapiens
gagctcccgcagcgtcacctcgg

SEQ ID NO: 21029 - DNA, 23 bp, Homo sapiens
ggagctcccgcagcgtcacctcg

SEQ ID NO: 21030 - DNA, 23 bp, Homo sapiens
tggagctcccgcagcgtcacctc

SEQ ID NO: 21031 - DNA, 23 bp, Homo sapiens
ctggagctcccgcagcgtcacct

SEQ ID NO: 21032 - DNA, 23 bp, Homo sapiens
cctggagctcccgcagcgtcacc

SEQ ID NO: 21033 - DNA, 23 bp, Homo sapiens
tcctggagctcccgcagcgtcac

SEQ ID NO: 21034 - DNA, 23 bp, Homo sapiens
ttcctggagctcccgcagcgtca

SEQ ID NO: 21035 - DNA, 23 bp, Homo sapiens
cttcctggagctcccgcagcgtc

SEQ ID NO: 21036 - DNA, 23 bp, Homo sapiens
gcttcctggagctcccgcagcgt

SEQ ID NO: 21037 - DNA, 23 bp, Homo sapiens
ggcttcctggagctcccgcagcg

SEQ ID NO: 21038 - DNA, 23 bp, Homo sapiens
gggcttcctggagctcccgcagc

SEQ ID NO: 21039 - DNA, 23 bp, Homo sapiens
agggcttcctggagctcccgcag

SEQ ID NO: 21040 - DNA, 23 bp, Homo sapiens
cagggcttcctggagctcccgca

SEQ ID NO: 21041 - DNA, 23 bp, Homo sapiens
ccagggcttcctggagctcccgc

SEQ ID NO: 21042 - DNA, 23 bp, Homo sapiens
tccagggcttcctggagctcccg

SEQ ID NO: 21043 - DNA, 23 bp, Homo sapiens
ctccagggcttcctggagctccc

SEQ ID NO: 21044 - DNA, 23 bp, Homo sapiens
cctccagggcttcctggagctcc

SEQ ID NO: 21045 - DNA, 23 bp, Homo sapiens
tcctccagggcttcctggagctc

SEQ ID NO: 21046 - DNA, 23 bp, Homo sapiens
ctcctccagggcttcctggagct

SEQ ID NO: 21047 - DNA, 23 bp, Homo sapiens
cctcctccagggcttcctggagc

SEQ ID NO: 21048 - DNA, 23 bp, Homo sapiens
tcctcctccagggcttcctggag

SEQ ID NO: 21049 - DNA, 23 bp, Homo sapiens
ctcctcctccagggcttcctgga

SEQ ID NO: 21050 - DNA, 23 bp, Homo sapiens
cctcctcctccagggcttcctgg

SEQ ID NO: 21051 - DNA, 23 bp, Homo sapiens
acctcctcctccagggcttcctg

SEQ ID NO: 21052 - DNA, 23 bp, Homo sapiens
cacctcctcctccagggcttcct

SEQ ID NO: 21053 - DNA, 23 bp, Homo sapiens
gcacctcctcctccagggcttcc

SEQ ID NO: 21054 - DNA, 23 bp, Homo sapiens
agcacctcctcctccagggcttc

SEQ ID NO: 21055 - DNA, 23 bp, Homo sapiens
gagcacctcctcctccagggctt

SEQ ID NO: 21056 - DNA, 23 bp, Homo sapiens
tgagcacctcctcctccagggct

SEQ ID NO: 21057 - DNA, 23 bp, Homo sapiens
gtgagcacctcctcctccagggc

SEQ ID NO: 21058 - DNA, 23 bp, Homo sapiens
ggtgagcacctcctcctccaggg

SEQ ID NO: 21059 - DNA, 23 bp, Homo sapiens
gggtgagcacctcctcctccagg

SEQ ID NO: 21060 - DNA, 23 bp, Homo sapiens
cgggtgagcacctcctcctccag

SEQ ID NO: 21061 - DNA, 23 bp, Homo sapiens
ccgggtgagcacctcctcctcca

SEQ ID NO: 21062 - DNA, 23 bp, Homo sapiens
gccgggtgagcacctcctcctcc

SEQ ID NO: 21063 - DNA, 23 bp, Homo sapiens
tgccgggtgagcacctcctcctc

SEQ ID NO: 21064 - DNA, 23 bp, Homo sapiens
ctgccgggtgagcacctcctcct

SEQ ID NO: 21065 - DNA, 23 bp, Homo sapiens
tctgccgggtgagcacctcctcc

SEQ ID NO: 21066 - DNA, 23 bp, Homo sapiens
ctctgccgggtgagcacctcctc

SEQ ID NO: 21067 - DNA, 23 bp, Homo sapiens
gctctgccgggtgagcacctcct

SEQ ID NO: 21068 - DNA, 23 bp, Homo sapiens
ggctctgccgggtgagcacctcc

SEQ ID NO: 21069 - DNA, 23 bp, Homo sapiens
aggctctgccgggtgagcacctc

SEQ ID NO: 21070 - DNA, 23 bp, Homo sapiens
caggctctgccgggtgagcacct

SEQ ID NO: 21071 - DNA, 23 bp, Homo sapiens
tcaggctctgccgggtgagcacc

SEQ ID NO: 21072 - DNA, 23 bp, Homo sapiens
ctcaggctctgccgggtgagcac

SEQ ID NO: 21073 - DNA, 23 bp, Homo sapiens
gctcaggctctgccgggtgagca

SEQ ID NO: 21074 - DNA, 23 bp, Homo sapiens
ggctcaggctctgccgggtgagc

SEQ ID NO: 21075 - DNA, 23 bp, Homo sapiens
cggctcaggctctgccgggtgag

SEQ ID NO: 21076 - DNA, 23 bp, Homo sapiens
ccggctcaggctctgccgggtga

SEQ ID NO: 21077 - DNA, 23 bp, Homo sapiens
cccggctcaggctctgccgggtg

SEQ ID NO: 21078 - DNA, 23 bp, Homo sapiens
tcccggctcaggctctgccgggt

SEQ ID NO: 21079 - DNA, 23 bp, Homo sapiens
ctcccggctcaggctctgccggg

SEQ ID NO: 21080 - DNA, 23 bp, Homo sapiens
tctcccggctcaggctctgccgg

SEQ ID NO: 21081 - DNA, 23 bp, Homo sapiens
atctcccggctcaggctctgccg

SEQ ID NO: 21082 - DNA, 23 bp, Homo sapiens
catctcccggctcaggctctgcc

SEQ ID NO: 21083 - DNA, 23 bp, Homo sapiens
ccatctcccggctcaggctctgc

SEQ ID NO: 21084 - DNA, 23 bp, Homo sapiens
tccatctcccggctcaggctctg

SEQ ID NO: 21085 - DNA, 23 bp, Homo sapiens
ctccatctcccggctcaggctct

SEQ ID NO: 21086 - DNA, 23 bp, Homo sapiens
cctccatctcccggctcaggctc

SEQ ID NO: 21087 - DNA, 23 bp, Homo sapiens
gcctccatctcccggctcaggct

SEQ ID NO: 21088 - DNA, 23 bp, Homo sapiens
ggcctccatctcccggctcaggc

SEQ ID NO: 21089 - DNA, 23 bp, Homo sapiens
tggcctccatctcccggctcagg

SEQ ID NO: 21090 - DNA, 23 bp, Homo sapiens
atggcctccatctcccggctcag

SEQ ID NO: 21091 - DNA, 23 bp, Homo sapiens
gatggcctccatctcccggctca

SEQ ID NO: 21092 - DNA, 23 bp, Homo sapiens
ggatggcctccatctcccggctc

SEQ ID NO: 21093 - DNA, 23 bp, Homo sapiens
cggatggcctccatctcccggct

SEQ ID NO: 21094 - DNA, 23 bp, Homo sapiens
gcggatggcctccatctcccggc

SEQ ID NO: 21095 - DNA, 23 bp, Homo sapiens
tgcggatggcctccatctcccgg

SEQ ID NO: 21096 - DNA, 23 bp, Homo sapiens
gtgcggatggcctccatctcccg

SEQ ID NO: 21097 - DNA, 23 bp, Homo sapiens
cgtgcggatggcctccatctccc

SEQ ID NO: 21098 - DNA, 23 bp, Homo sapiens
ccgtgcggatggcctccatctcc

SEQ ID NO: 21099 - DNA, 23 bp, Homo sapiens
tccgtgcggatggcctccatctc

SEQ ID NO: 21100 - DNA, 23 bp, Homo sapiens
gtccgtgcggatggcctccatct

SEQ ID NO: 21101 - DNA, 23 bp, Homo sapiens
tgtccgtgcggatggcctccatc

SEQ ID NO: 21102 - DNA, 23 bp, Homo sapiens
ttgtccgtgcggatggcctccat

SEQ ID NO: 21103 - DNA, 23 bp, Homo sapiens
gttgtccgtgcggatggcctcca

SEQ ID NO: 21104 - DNA, 23 bp, Homo sapiens
ggttgtccgtgcggatggcctcc

SEQ ID NO: 21105 - DNA, 23 bp, Homo sapiens
tggttgtccgtgcggatggcctc

SEQ ID NO: 21106 - DNA, 23 bp, Homo sapiens
ctggttgtccgtgcggatggcct

SEQ ID NO: 21107 - DNA, 23 bp, Homo sapiens
tctggttgtccgtgcggatggcc

SEQ ID NO: 21108 - DNA, 23 bp, Homo sapiens
ttctggttgtccgtgcggatggc

SEQ ID NO: 21109 - DNA, 23 bp, Homo sapiens
gttctggttgtccgtgcggatgg

SEQ ID NO: 21110 - DNA, 23 bp, Homo sapiens
agttctggttgtccgtgcggatg

SEQ ID NO: 21111 - DNA, 23 bp, Homo sapiens
aagttctggttgtccgtgcggat

SEQ ID NO: 21112 - DNA, 23 bp, Homo sapiens
gaagttctggttgtccgtgcgga

SEQ ID NO: 21113 - DNA, 23 bp, Homo sapiens
cgaagttctggttgtccgtgcgg

SEQ ID NO: 21114 - DNA, 23 bp, Homo sapiens
gcgaagttctggttgtccgtgcg

SEQ ID NO: 21115 - DNA, 23 bp, Homo sapiens
ggcgaagttctggttgtccgtgc

SEQ ID NO: 21116 - DNA, 23 bp, Homo sapiens
tggcgaagttctggttgtccgtg

SEQ ID NO: 21117 - DNA, 23 bp, Homo sapiens
ctggcgaagttctggttgtccgt

SEQ ID NO: 21118 - DNA, 23 bp, Homo sapiens
actggcgaagttctggttgtccg

SEQ ID NO: 21119 - DNA, 23 bp, Homo sapiens
gactggcgaagttctggttgtcc

SEQ ID NO: 21120 - DNA, 23 bp, Homo sapiens
tgactggcgaagttctggttgtc

SEQ ID NO: 21121 - DNA, 23 bp, Homo sapiens
ttgactggcgaagttctggttgt

SEQ ID NO: 21122 - DNA, 23 bp, Homo sapiens
gttgactggcgaagttctggttg

SEQ ID NO: 21123 - DNA, 23 bp, Homo sapiens
agttgactggcgaagttctggtt

SEQ ID NO: 21124 - DNA, 23 bp, Homo sapiens
tagttgactggcgaagttctggt

SEQ ID NO: 21125 - DNA, 23 bp, Homo sapiens
gtagttgactggcgaagttctgg

SEQ ID NO: 21126 - DNA, 23 bp, Homo sapiens
cgtagttgactggcgaagttctg

SEQ ID NO: 21127 - DNA, 23 bp, Homo sapiens
gcgtagttgactggcgaagttct

SEQ ID NO: 21128 - DNA, 23 bp, Homo sapiens
cgcgtagttgactggcgaagttc

SEQ ID NO: 21129 - DNA, 23 bp, Homo sapiens
tcgcgtagttgactggcgaagtt

SEQ ID NO: 21130 - DNA, 23 bp, Homo sapiens
ctcgcgtagttgactggcgaagt

SEQ ID NO: 21131 - DNA, 23 bp, Homo sapiens
cctcgcgtagttgactggcgaag

SEQ ID NO: 21132 - DNA, 23 bp, Homo sapiens
gcctcgcgtagttgactggcgaa

SEQ ID NO: 21133 - DNA, 23 bp, Homo sapiens
tgcctcgcgtagttgactggcga

SEQ ID NO: 21134 - DNA, 23 bp, Homo sapiens
ctgcctcgcgtagttgactggcg

SEQ ID NO: 21135 - DNA, 23 bp, Homo sapiens
tctgcctcgcgtagttgactggc

SEQ ID NO: 21136 - DNA, 23 bp, Homo sapiens
ctctgcctcgcgtagttgactgg

SEQ ID NO: 21137 - DNA, 23 bp, Homo sapiens
cctctgcctcgcgtagttgactg

SEQ ID NO: 21138 - DNA, 23 bp, Homo sapiens
gcctctgcctcgcgtagttgact

SEQ ID NO: 21139 - DNA, 23 bp, Homo sapiens
agcctctgcctcgcgtagttgac

SEQ ID NO: 21140 - DNA, 23 bp, Homo sapiens
gagcctctgcctcgcgtagttga

SEQ ID NO: 21141 - DNA, 23 bp, Homo sapiens
cgagcctctgcctcgcgtagttg

SEQ ID NO: 21142 - DNA, 23 bp, Homo sapiens
ccgagcctctgcctcgcgtagtt

SEQ ID NO: 21143 - DNA, 23 bp, Homo sapiens
tccgagcctctgcctcgcgtagt

SEQ ID NO: 21144 - DNA, 23 bp, Homo sapiens
ttccgagcctctgcctcgcgtag

SEQ ID NO: 21145 - DNA, 23 bp, Homo sapiens
gttccgagcctctgcctcgcgta

SEQ ID NO: 21146 - DNA, 23 bp, Homo sapiens
ggttccgagcctctgcctcgcgt

SEQ ID NO: 21147 - DNA, 23 bp, Homo sapiens
cggttccgagcctctgcctcgcg

SEQ ID NO: 21148 - DNA, 23 bp, Homo sapiens
ccggttccgagcctctgcctcgc

SEQ ID NO: 21149 - DNA, 23 bp, Homo sapiens
cccggttccgagcctctgcctcg

SEQ ID NO: 21150 - DNA, 23 bp, Homo sapiens
tcccggttccgagcctctgcctc

SEQ ID NO: 21151 - DNA, 23 bp, Homo sapiens
gtcccggttccgagcctctgcct

SEQ ID NO: 21152 - DNA, 23 bp, Homo sapiens
ggtcccggttccgagcctctgcc

SEQ ID NO: 21153 - DNA, 23 bp, Homo sapiens
aggtcccggttccgagcctctgc

SEQ ID NO: 21154 - DNA, 23 bp, Homo sapiens
taggtcccggttccgagcctctg

SEQ ID NO: 21155 - DNA, 23 bp, Homo sapiens
ctaggtcccggttccgagcctct

SEQ ID NO: 21156 - DNA, 23 bp, Homo sapiens
tctaggtcccggttccgagcctc

SEQ ID NO: 21157 - DNA, 23 bp, Homo sapiens
ctctaggtcccggttccgagcct

SEQ ID NO: 21158 - DNA, 23 bp, Homo sapiens
cctctaggtcccggttccgagcc

SEQ ID NO: 21159 - DNA, 23 bp, Homo sapiens
gcctctaggtcccggttccgagc

SEQ ID NO: 21160 - DNA, 23 bp, Homo sapiens
tgcctctaggtcccggttccgag

SEQ ID NO: 21161 - DNA, 23 bp, Homo sapiens
gtgcctctaggtcccggttccga

SEQ ID NO: 21162 - DNA, 23 bp, Homo sapiens
tgtgcctctaggtcccggttccg

SEQ ID NO: 21163 - DNA, 23 bp, Homo sapiens
gtgtgcctctaggtcccggttcc

SEQ ID NO: 21164 - DNA, 23 bp, Homo sapiens
cgtgtgcctctaggtcccggttc

SEQ ID NO: 21165 - DNA, 23 bp, Homo sapiens
acgtgtgcctctaggtcccggtt

SEQ ID NO: 21166 - DNA, 23 bp, Homo sapiens
gacgtgtgcctctaggtcccggt

SEQ ID NO: 21167 - DNA, 23 bp, Homo sapiens
ggacgtgtgcctctaggtcccgg

SEQ ID NO: 21168 - DNA, 23 bp, Homo sapiens
cggacgtgtgcctctaggtcccg

SEQ ID NO: 21169 - DNA, 23 bp, Homo sapiens
ccggacgtgtgcctctaggtccc

SEQ ID NO: 21170 - DNA, 23 bp, Homo sapiens
gccggacgtgtgcctctaggtcc

SEQ ID NO: 21171 - DNA, 23 bp, Homo sapiens
tgccggacgtgtgcctctaggtc

SEQ ID NO: 21172 - DNA, 23 bp, Homo sapiens
ctgccggacgtgtgcctctaggt

SEQ ID NO: 21173 - DNA, 23 bp, Homo sapiens
actgccggacgtgtgcctctagg

SEQ ID NO: 21174 - DNA, 23 bp, Homo sapiens
aactgccggacgtgtgcctctag

SEQ ID NO: 21175 - DNA, 23 bp, Homo sapiens
caactgccggacgtgtgcctcta

SEQ ID NO: 21176 - DNA, 23 bp, Homo sapiens
gcaactgccggacgtgtgcctct

SEQ ID NO: 21177 - DNA, 23 bp, Homo sapiens
tgcaactgccggacgtgtgcctc

SEQ ID NO: 21178 - DNA, 23 bp, Homo sapiens
ctgcaactgccggacgtgtgcct

SEQ ID NO: 21179 - DNA, 23 bp, Homo sapiens
cctgcaactgccggacgtgtgcc

SEQ ID NO: 21180 - DNA, 23 bp, Homo sapiens
tcctgcaactgccggacgtgtgc

SEQ ID NO: 21181 - DNA, 23 bp, Homo sapiens
ctcctgcaactgccggacgtgtg

SEQ ID NO: 21182 - DNA, 23 bp, Homo sapiens
gctcctgcaactgccggacgtgt

SEQ ID NO: 21183 - DNA, 23 bp, Homo sapiens
cgctcctgcaactgccggacgtg

SEQ ID NO: 21184 - DNA, 23 bp, Homo sapiens
ccgctcctgcaactgccggacgt

SEQ ID NO: 21185 - DNA, 23 bp, Homo sapiens
tccgctcctgcaactgccggacg

SEQ ID NO: 21186 - DNA, 23 bp, Homo sapiens
atccgctcctgcaactgccggac

SEQ ID NO: 21187 - DNA, 23 bp, Homo sapiens
catccgctcctgcaactgccgga

SEQ ID NO: 21188 - DNA, 23 bp, Homo sapiens
ccatccgctcctgcaactgccgg

SEQ ID NO: 21189 - DNA, 23 bp, Homo sapiens
tccatccgctcctgcaactgccg

SEQ ID NO: 21190 - DNA, 23 bp, Homo sapiens
ctccatccgctcctgcaactgcc

SEQ ID NO: 21191 - DNA, 23 bp, Homo sapiens
actccatccgctcctgcaactgc

SEQ ID NO: 21192 - DNA, 23 bp, Homo sapiens
aactccatccgctcctgcaactg

SEQ ID NO: 21193 - DNA, 23 bp, Homo sapiens
caactccatccgctcctgcaact

SEQ ID NO: 21194 - DNA, 23 bp, Homo sapiens
gcaactccatccgctcctgcaac

SEQ ID NO: 21195 - DNA, 23 bp, Homo sapiens
agcaactccatccgctcctgcaa

SEQ ID NO: 21196 - DNA, 23 bp, Homo sapiens
cagcaactccatccgctcctgca

SEQ ID NO: 21197 - DNA, 23 bp, Homo sapiens
gcagcaactccatccgctcctgc

SEQ ID NO: 21198 - DNA, 23 bp, Homo sapiens
tgcagcaactccatccgctcctg

SEQ ID NO: 21199 - DNA, 23 bp, Homo sapiens
ctgcagcaactccatccgctcct

SEQ ID NO: 21200 - DNA, 23 bp, Homo sapiens
cctgcagcaactccatccgctcc

SEQ ID NO: 21201 - DNA, 23 bp, Homo sapiens
gcctgcagcaactccatccgctc

SEQ ID NO: 21202 - DNA, 23 bp, Homo sapiens
tgcctgcagcaactccatccgct

SEQ ID NO: 21203 - DNA, 23 bp, Homo sapiens
ctgcctgcagcaactccatccgc

SEQ ID NO: 21204 - DNA, 23 bp, Homo sapiens
tctgcctgcagcaactccatccg

SEQ ID NO: 21205 - DNA, 23 bp, Homo sapiens
ctctgcctgcagcaactccatcc

SEQ ID NO: 21206 - DNA, 23 bp, Homo sapiens
cctctgcctgcagcaactccatc

SEQ ID NO: 21207 - DNA, 23 bp, Homo sapiens
ccctctgcctgcagcaactccat

SEQ ID NO: 21208 - DNA, 23 bp, Homo sapiens
tccctctgcctgcagcaactcca

SEQ ID NO: 21209 - DNA, 23 bp, Homo sapiens
ctccctctgcctgcagcaactcc

SEQ ID NO: 21210 - DNA, 23 bp, Homo sapiens
gctccctctgcctgcagcaactc

SEQ ID NO: 21211 - DNA, 23 bp, Homo sapiens
ggctccctctgcctgcagcaact

SEQ ID NO: 21212 - DNA, 23 bp, Homo sapiens
tggctccctctgcctgcagcaac

SEQ ID NO: 21213 - DNA, 23 bp, Homo sapiens
gtggctccctctgcctgcagcaa

SEQ ID NO: 21214 - DNA, 23 bp, Homo sapiens
tgtggctccctctgcctgcagca

SEQ ID NO: 21215 - DNA, 23 bp, Homo sapiens
ctgtggctccctctgcctgcagc

SEQ ID NO: 21216 - DNA, 23 bp, Homo sapiens
cctgtggctccctctgcctgcag

SEQ ID NO: 21217 - DNA, 23 bp, Homo sapiens
acctgtggctccctctgcctgca

SEQ ID NO: 21218 - DNA, 23 bp, Homo sapiens
gacctgtggctccctctgcctgc

SEQ ID NO: 21219 - DNA, 23 bp, Homo sapiens
ggacctgtggctccctctgcctg

SEQ ID NO: 21220 - DNA, 23 bp, Homo sapiens
gggacctgtggctccctctgcct

SEQ ID NO: 21221 - DNA, 23 bp, Homo sapiens
agggacctgtggctccctctgcc

SEQ ID NO: 21222 - DNA, 23 bp, Homo sapiens
tagggacctgtggctccctctgc

SEQ ID NO: 21223 - DNA, 23 bp, Homo sapiens
ctagggacctgtggctccctctg

SEQ ID NO: 21224 - DNA, 23 bp, Homo sapiens
cctagggacctgtggctccctct

SEQ ID NO: 21225 - DNA, 23 bp, Homo sapiens
gcctagggacctgtggctccctc

SEQ ID NO: 21226 - DNA, 23 bp, Homo sapiens
ggcctagggacctgtggctccct

SEQ ID NO: 21227 - DNA, 23 bp, Homo sapiens
aggcctagggacctgtggctccc

SEQ ID NO: 21228 - DNA, 23 bp, Homo sapiens
caggcctagggacctgtggctcc

SEQ ID NO: 21229 - DNA, 23 bp, Homo sapiens
ccaggcctagggacctgtggctc

SEQ ID NO: 21230 - DNA, 23 bp, Homo sapiens
gccaggcctagggacctgtggct

SEQ ID NO: 21231 - DNA, 23 bp, Homo sapiens
ggccaggcctagggacctgtggc

SEQ ID NO: 21232 - DNA, 23 bp, Homo sapiens
aggccaggcctagggacctgtgg

SEQ ID NO: 21233 - DNA, 23 bp, Homo sapiens
taggccaggcctagggacctgtg

SEQ ID NO: 21234 - DNA, 23 bp, Homo sapiens
ataggccaggcctagggacctgt

SEQ ID NO: 21235 - DNA, 23 bp, Homo sapiens
gataggccaggcctagggacctg

SEQ ID NO: 21236 - DNA, 23 bp, Homo sapiens
cgataggccaggcctagggacct

SEQ ID NO: 21237 - DNA, 23 bp, Homo sapiens
ccgataggccaggcctagggacc

SEQ ID NO: 21238 - DNA, 23 bp, Homo sapiens
tccgataggccaggcctagggac

SEQ ID NO: 21239 - DNA, 23 bp, Homo sapiens
ctccgataggccaggcctaggga

SEQ ID NO: 21240 - DNA, 23 bp, Homo sapiens
cctccgataggccaggcctaggg

SEQ ID NO: 21241 - DNA, 23 bp, Homo sapiens
gcctccgataggccaggcctagg

SEQ ID NO: 21242 - DNA, 23 bp, Homo sapiens
cgcctccgataggccaggcctag

SEQ ID NO: 21243 - DNA, 23 bp, Homo sapiens
gcgcctccgataggccaggccta

SEQ ID NO: 21244 - DNA, 23 bp, Homo sapiens
agcgcctccgataggccaggcct

SEQ ID NO: 21245 - DNA, 23 bp, Homo sapiens
aagcgcctccgataggccaggcc

SEQ ID NO: 21246 - DNA, 23 bp, Homo sapiens
aaagcgcctccgataggccaggc

SEQ ID NO: 21247 - DNA, 23 bp, Homo sapiens
gaaagcgcctccgataggccagg

SEQ ID NO: 21248 - DNA, 23 bp, Homo sapiens
ggaaagcgcctccgataggccag

SEQ ID NO: 21249 - DNA, 23 bp, Homo sapiens
gggaaagcgcctccgataggcca

SEQ ID NO: 21250 - DNA, 23 bp, Homo sapiens
agggaaagcgcctccgataggcc

SEQ ID NO: 21251 - DNA, 23 bp, Homo sapiens
cagggaaagcgcctccgataggc

SEQ ID NO: 21252 - DNA, 23 bp, Homo sapiens
gcagggaaagcgcctccgatagg

SEQ ID NO: 21253 - DNA, 23 bp, Homo sapiens
agcagggaaagcgcctccgatag

SEQ ID NO: 21254 - DNA, 23 bp, Homo sapiens
gagcagggaaagcgcctccgata

SEQ ID NO: 21255 - DNA, 23 bp, Homo sapiens
ggagcagggaaagcgcctccgat

SEQ ID NO: 21256 - DNA, 23 bp, Homo sapiens
aggagcagggaaagcgcctccga

SEQ ID NO: 21257 - DNA, 23 bp, Homo sapiens
caggagcagggaaagcgcctccg

SEQ ID NO: 21258 - DNA, 23 bp, Homo sapiens
acaggagcagggaaagcgcctcc

SEQ ID NO: 21259 - DNA, 23 bp, Homo sapiens
aacaggagcagggaaagcgcctc

SEQ ID NO: 21260 - DNA, 23 bp, Homo sapiens
gaacaggagcagggaaagcgcct

SEQ ID NO: 21261 - DNA, 23 bp, Homo sapiens
cgaacaggagcagggaaagcgcc

SEQ ID NO: 21262 - DNA, 23 bp, Homo sapiens
gcgaacaggagcagggaaagcgc

SEQ ID NO: 21263 - DNA, 23 bp, Homo sapiens
ggcgaacaggagcagggaaagcg

SEQ ID NO: 21264 - DNA, 23 bp, Homo sapiens
cggcgaacaggagcagggaaagc

SEQ ID NO: 21265 - DNA, 23 bp, Homo sapiens
acggcgaacaggagcagggaaag

SEQ ID NO: 21266 - DNA, 23 bp, Homo sapiens
aacggcgaacaggagcagggaaa

SEQ ID NO: 21267 - DNA, 23 bp, Homo sapiens
caacggcgaacaggagcagggaa

SEQ ID NO: 21268 - DNA, 23 bp, Homo sapiens
acaacggcgaacaggagcaggga

SEQ ID NO: 21269 - DNA, 23 bp, Homo sapiens
aacaacggcgaacaggagcaggg

SEQ ID NO: 21270 - DNA, 23 bp, Homo sapiens
gaacaacggcgaacaggagcagg

SEQ ID NO: 21271 - DNA, 23 bp, Homo sapiens
agaacaacggcgaacaggagcag

SEQ ID NO: 21272 - DNA, 23 bp, Homo sapiens
cagaacaacggcgaacaggagca

SEQ ID NO: 21273 - DNA, 23 bp, Homo sapiens
acagaacaacggcgaacaggagc

SEQ ID NO: 21274 - DNA, 23 bp, Homo sapiens
gacagaacaacggcgaacaggag

SEQ ID NO: 21275 - DNA, 23 bp, Homo sapiens
agacagaacaacggcgaacagga

SEQ ID NO: 21276 - DNA, 23 bp, Homo sapiens
gagacagaacaacggcgaacagg

SEQ ID NO: 21277 - DNA, 23 bp, Homo sapiens
cgagacagaacaacggcgaacag

SEQ ID NO: 21278 - DNA, 23 bp, Homo sapiens
acgagacagaacaacggcgaaca

SEQ ID NO: 21279 - DNA, 23 bp, Homo sapiens
cacgagacagaacaacggcgaac

SEQ ID NO: 21280 - DNA, 23 bp, Homo sapiens
gcacgagacagaacaacggcgaa

SEQ ID NO: 21281 - DNA, 23 bp, Homo sapiens
ggcacgagacagaacaacggcga

SEQ ID NO: 21282 - DNA, 23 bp, Homo sapiens
cggcacgagacagaacaacggcg

SEQ ID NO: 21283 - DNA, 23 bp, Homo sapiens
gcggcacgagacagaacaacggc

SEQ ID NO: 21284 - DNA, 23 bp, Homo sapiens
ggcggcacgagacagaacaacgg

SEQ ID NO: 21285 - DNA, 23 bp, Homo sapiens
cggcggcacgagacagaacaacg

SEQ ID NO: 21286 - DNA, 23 bp, Homo sapiens
gcggcggcacgagacagaacaac

SEQ ID NO: 21287 - DNA, 23 bp, Homo sapiens
ggcggcggcacgagacagaacaa

SEQ ID NO: 21288 - DNA, 23 bp, Homo sapiens
gggcggcggcacgagacagaaca

SEQ ID NO: 21289 - DNA, 23 bp, Homo sapiens
agggcggcggcacgagacagaac

SEQ ID NO: 21290 - DNA, 23 bp, Homo sapiens
cagggcggcggcacgagacagaa

SEQ ID NO: 21291 - DNA, 23 bp, Homo sapiens
ccagggcggcggcacgagacaga

SEQ ID NO: 21292 - DNA, 23 bp, Homo sapiens
cccagggcggcggcacgagacag

SEQ ID NO: 21293 - DNA, 23 bp, Homo sapiens
gcccagggcggcggcacgagaca

SEQ ID NO: 21294 - DNA, 23 bp, Homo sapiens
agcccagggcggcggcacgagac

SEQ ID NO: 21295 - DNA, 23 bp, Homo sapiens
cagcccagggcggcggcacgaga

SEQ ID NO: 21296 - DNA, 23 bp, Homo sapiens
gcagcccagggcggcggcacgag

SEQ ID NO: 21297 - DNA, 23 bp, Homo sapiens
tgcagcccagggcggcggcacga

SEQ ID NO: 21298 - DNA, 23 bp, Homo sapiens
atgcagcccagggcggcggcacg

SEQ ID NO: 21299 - DNA, 23 bp, Homo sapiens
aatgcagcccagggcggcggcac

SEQ ID NO: 21300 - DNA, 23 bp, Homo sapiens
caatgcagcccagggcggcggca

SEQ ID NO: 21301 - DNA, 23 bp, Homo sapiens
ccaatgcagcccagggcggcggc

SEQ ID NO: 21302 - DNA, 23 bp, Homo sapiens
cccaatgcagcccagggcggcgg

SEQ ID NO: 21303 - DNA, 23 bp, Homo sapiens
acccaatgcagcccagggcggcg

SEQ ID NO: 21304 - DNA, 23 bp, Homo sapiens
aacccaatgcagcccagggcggc

SEQ ID NO: 21305 - DNA, 23 bp, Homo sapiens
caacccaatgcagcccagggcgg

SEQ ID NO: 21306 - DNA, 23 bp, Homo sapiens
ccaacccaatgcagcccagggcg

SEQ ID NO: 21307 - DNA, 23 bp, Homo sapiens
accaacccaatgcagcccagggc

SEQ ID NO: 21308 - DNA, 23 bp, Homo sapiens
caccaacccaatgcagcccaggg

SEQ ID NO: 21309 - DNA, 23 bp, Homo sapiens
ccaccaacccaatgcagcccagg

SEQ ID NO: 21310 - DNA, 23 bp, Homo sapiens
gccaccaacccaatgcagcccag

SEQ ID NO: 21311 - DNA, 23 bp, Homo sapiens
ggccaccaacccaatgcagccca

SEQ ID NO: 21312 - DNA, 23 bp, Homo sapiens
gggccaccaacccaatgcagccc

SEQ ID NO: 21313 - DNA, 23 bp, Homo sapiens
tgggccaccaacccaatgcagcc

SEQ ID NO: 21314 - DNA, 23 bp, Homo sapiens
gtgggccaccaacccaatgcagc

SEQ ID NO: 21315 - DNA, 23 bp, Homo sapiens
cgtgggccaccaacccaatgcag

SEQ ID NO: 21316 - DNA, 23 bp, Homo sapiens
gcgtgggccaccaacccaatgca

SEQ ID NO: 21317 - DNA, 23 bp, Homo sapiens
ggcgtgggccaccaacccaatgc

SEQ ID NO: 21318 - DNA, 23 bp, Homo sapiens
cggcgtgggccaccaacccaatg

SEQ ID NO: 21319 - DNA, 23 bp, Homo sapiens
ccggcgtgggccaccaacccaat

SEQ ID NO: 21320 - DNA, 23 bp, Homo sapiens
gccggcgtgggccaccaacccaa

SEQ ID NO: 21321 - DNA, 23 bp, Homo sapiens
ggccggcgtgggccaccaaccca

SEQ ID NO: 21322 - DNA, 23 bp, Homo sapiens
tggccggcgtgggccaccaaccc

SEQ ID NO: 21323 - DNA, 23 bp, Homo sapiens
ttggccggcgtgggccaccaacc

SEQ ID NO: 21324 - DNA, 23 bp, Homo sapiens
gttggccggcgtgggccaccaac

SEQ ID NO: 21325 - DNA, 23 bp, Homo sapiens
agttggccggcgtgggccaccaa

SEQ ID NO: 21326 - DNA, 23 bp, Homo sapiens
gagttggccggcgtgggccacca

SEQ ID NO: 21327 - DNA, 23 bp, Homo sapiens
tgagttggccggcgtgggccacc

SEQ ID NO: 21328 - DNA, 23 bp, Homo sapiens
gtgagttggccggcgtgggccac

SEQ ID NO: 21329 - DNA, 23 bp, Homo sapiens
ggtgagttggccggcgtgggcca

SEQ ID NO: 21330 - DNA, 23 bp, Homo sapiens
cggtgagttggccggcgtgggcc

SEQ ID NO: 21331 - DNA, 23 bp, Homo sapiens
gcggtgagttggccggcgtgggc

SEQ ID NO: 21332 - DNA, 23 bp, Homo sapiens
tgcggtgagttggccggcgtggg

SEQ ID NO: 21333 - DNA, 23 bp, Homo sapiens
ctgcggtgagttggccggcgtgg

SEQ ID NO: 21334 - DNA, 23 bp, Homo sapiens
actgcggtgagttggccggcgtg

SEQ ID NO: 21335 - DNA, 23 bp, Homo sapiens
gactgcggtgagttggccggcgt

SEQ ID NO: 21336 - DNA, 23 bp, Homo sapiens
agactgcggtgagttggccggcg

SEQ ID NO: 21337 - DNA, 23 bp, Homo sapiens
cagactgcggtgagttggccggc

SEQ ID NO: 21338 - DNA, 23 bp, Homo sapiens
ccagactgcggtgagttggccgg

SEQ ID NO: 21339 - DNA, 23 bp, Homo sapiens
gccagactgcggtgagttggccg

SEQ ID NO: 21340 - DNA, 23 bp, Homo sapiens
cgccagactgcggtgagttggcc

SEQ ID NO: 21341 - DNA, 23 bp, Homo sapiens
gcgccagactgcggtgagttggc

SEQ ID NO: 21342 - DNA, 23 bp, Homo sapiens
ggcgccagactgcggtgagttgg

SEQ ID NO: 21343 - DNA, 23 bp, Homo sapiens
cggcgccagactgcggtgagttg

SEQ ID NO: 21344 - DNA, 23 bp, Homo sapiens
gcggcgccagactgcggtgagtt

SEQ ID NO: 21345 - DNA, 23 bp, Homo sapiens
ggcggcgccagactgcggtgagt

SEQ ID NO: 21346 - DNA, 23 bp, Homo sapiens
gggcggcgccagactgcggtgag

SEQ ID NO: 21347 - DNA, 23 bp, Homo sapiens
tgggcggcgccagactgcggtga

SEQ ID NO: 21348 - DNA, 23 bp, Homo sapiens
ctgggcggcgccagactgcggtg

SEQ ID NO: 21349 - DNA, 23 bp, Homo sapiens
cctgggcggcgccagactgcggt

SEQ ID NO: 21350 - DNA, 23 bp, Homo sapiens
tcctgggcggcgccagactgcgg

SEQ ID NO: 21351 - DNA, 23 bp, Homo sapiens
ctcctgggcggcgccagactgcg

SEQ ID NO: 21352 - DNA, 23 bp, Homo sapiens
gctcctgggcggcgccagactgc

SEQ ID NO: 21353 - DNA, 23 bp, Homo sapiens
ggctcctgggcggcgccagactg

SEQ ID NO: 21354 - DNA, 23 bp, Homo sapiens
cggctcctgggcggcgccagact

SEQ ID NO: 21355 - DNA, 23 bp, Homo sapiens
gcggctcctgggcggcgccagac

SEQ ID NO: 21356 - DNA, 23 bp, Homo sapiens
ggcggctcctgggcggcgccaga

SEQ ID NO: 21357 - DNA, 23 bp, Homo sapiens
gggcggctcctgggcggcgccag

SEQ ID NO: 21358 - DNA, 23 bp, Homo sapiens
cgggcggctcctgggcggcgcca

SEQ ID NO: 21359 - DNA, 23 bp, Homo sapiens
gcgggcggctcctgggcggcgcc

SEQ ID NO: 21360 - DNA, 23 bp, Homo sapiens
cgcgggcggctcctgggcggcgc

SEQ ID NO: 21361 - DNA, 23 bp, Homo sapiens
gcgcgggcggctcctgggcggcg

SEQ ID NO: 21362 - DNA, 23 bp, Homo sapiens
agcgcgggcggctcctgggcggc

SEQ ID NO: 21363 - DNA, 23 bp, Homo sapiens
gagcgcgggcggctcctgggcgg

SEQ ID NO: 21364 - DNA, 23 bp, Homo sapiens
ggagcgcgggcggctcctgggcg

SEQ ID NO: 21365 - DNA, 23 bp, Homo sapiens
gggagcgcgggcggctcctgggc

SEQ ID NO: 21366 - DNA, 23 bp, Homo sapiens
agggagcgcgggcggctcctggg

SEQ ID NO: 21367 - DNA, 23 bp, Homo sapiens
cagggagcgcgggcggctcctgg

SEQ ID NO: 21368 - DNA, 23 bp, Homo sapiens
tcagggagcgcgggcggctcctg

SEQ ID NO: 21369 - DNA, 23 bp, Homo sapiens
ttcagggagcgcgggcggctcct

SEQ ID NO: 21370 - DNA, 23 bp, Homo sapiens
gttcagggagcgcgggcggctcc

SEQ ID NO: 21371 - DNA, 23 bp, Homo sapiens
ggttcagggagcgcgggcggctc

SEQ ID NO: 21372 - DNA, 23 bp, Homo sapiens
gggttcagggagcgcgggcggct

SEQ ID NO: 21373 - DNA, 23 bp, Homo sapiens
agggttcagggagcgcgggcggc

SEQ ID NO: 21374 - DNA, 23 bp, Homo sapiens
tagggttcagggagcgcgggcgg

SEQ ID NO: 21375 - DNA, 23 bp, Homo sapiens
ctagggttcagggagcgcgggcg

SEQ ID NO: 21376 - DNA, 23 bp, Homo sapiens
tctagggttcagggagcgcgggc

SEQ ID NO: 21377 - DNA, 23 bp, Homo sapiens
ttctagggttcagggagcgcggg

SEQ ID NO: 21378 - DNA, 23 bp, Homo sapiens
gttctagggttcagggagcgcgg

SEQ ID NO: 21379 - DNA, 23 bp, Homo sapiens
agttctagggttcagggagcgcg

SEQ ID NO: 21380 - DNA, 23 bp, Homo sapiens
cagttctagggttcagggagcgc

SEQ ID NO: 21381 - DNA, 23 bp, Homo sapiens
acagttctagggttcagggagcg

SEQ ID NO: 21382 - DNA, 23 bp, Homo sapiens
gacagttctagggttcagggagc

SEQ ID NO: 21383 - DNA, 23 bp, Homo sapiens
agacagttctagggttcagggag

SEQ ID NO: 21384 - DNA, 23 bp, Homo sapiens
aagacagttctagggttcaggga

SEQ ID NO: 21385 - DNA, 23 bp, Homo sapiens
gaagacagttctagggttcaggg

SEQ ID NO: 21386 - DNA, 23 bp, Homo sapiens
cgaagacagttctagggttcagg

SEQ ID NO: 21387 - DNA, 23 bp, Homo sapiens
tcgaagacagttctagggttcag

SEQ ID NO: 21388 - DNA, 23 bp, Homo sapiens
gtcgaagacagttctagggttca

SEQ ID NO: 21389 - DNA, 23 bp, Homo sapiens
agtcgaagacagttctagggttc

SEQ ID NO: 21390 - DNA, 23 bp, Homo sapiens
gagtcgaagacagttctagggtt

SEQ ID NO: 21391 - DNA, 23 bp, Homo sapiens
ggagtcgaagacagttctagggt

SEQ ID NO: 21392 - DNA, 23 bp, Homo sapiens
cggagtcgaagacagttctaggg

SEQ ID NO: 21393 - DNA, 23 bp, Homo sapiens
ccggagtcgaagacagttctagg

SEQ ID NO: 21394 - DNA, 23 bp, Homo sapiens
cccggagtcgaagacagttctag

SEQ ID NO: 21395 - DNA, 23 bp, Homo sapiens
ccccggagtcgaagacagttcta

SEQ ID NO: 21396 - DNA, 23 bp, Homo sapiens
gccccggagtcgaagacagttct

SEQ ID NO: 21397 - DNA, 23 bp, Homo sapiens
ggccccggagtcgaagacagttc

SEQ ID NO: 21398 - DNA, 23 bp, Homo sapiens
gggccccggagtcgaagacagtt

SEQ ID NO: 21399 - DNA, 23 bp, Homo sapiens
ggggccccggagtcgaagacagt

SEQ ID NO: 21400 - DNA, 23 bp, Homo sapiens
cggggccccggagtcgaagacag

SEQ ID NO: 21401 - DNA, 23 bp, Homo sapiens
acggggccccggagtcgaagaca

SEQ ID NO: 21402 - DNA, 23 bp, Homo sapiens
aacggggccccggagtcgaagac

SEQ ID NO: 21403 - DNA, 23 bp, Homo sapiens
caacggggccccggagtcgaaga

SEQ ID NO: 21404 - DNA, 23 bp, Homo sapiens
ccaacggggccccggagtcgaag

SEQ ID NO: 21405 - DNA, 23 bp, Homo sapiens
tccaacggggccccggagtcgaa

SEQ ID NO: 21406 - DNA, 23 bp, Homo sapiens
ttccaacggggccccggagtcga

SEQ ID NO: 21407 - DNA, 23 bp, Homo sapiens
cttccaacggggccccggagtcg

SEQ ID NO: 21408 - DNA, 23 bp, Homo sapiens
tcttccaacggggccccggagtc

SEQ ID NO: 21409 - DNA, 23 bp, Homo sapiens
gtcttccaacggggccccggagt

SEQ ID NO: 21410 - DNA, 23 bp, Homo sapiens
agtcttccaacggggccccggag

SEQ ID NO: 21411 - DNA, 23 bp, Homo sapiens
cagtcttccaacggggccccgga

SEQ ID NO: 21412 - DNA, 23 bp, Homo sapiens
tcagtcttccaacggggccccgg

SEQ ID NO: 21413 - DNA, 23 bp, Homo sapiens
ctcagtcttccaacggggccccg

SEQ ID NO: 21414 - DNA, 23 bp, Homo sapiens
actcagtcttccaacggggcccc

SEQ ID NO: 21415 - DNA, 23 bp, Homo sapiens
cactcagtcttccaacggggccc

SEQ ID NO: 21416 - DNA, 23 bp, Homo sapiens
gcactcagtcttccaacggggcc

SEQ ID NO: 21417 - DNA, 23 bp, Homo sapiens
ggcactcagtcttccaacggggc

SEQ ID NO: 21418 - DNA, 23 bp, Homo sapiens
gggcactcagtcttccaacgggg

SEQ ID NO: 21419 - DNA, 23 bp, Homo sapiens
cgggcactcagtcttccaacggg

SEQ ID NO: 21420 - DNA, 23 bp, Homo sapiens
ccgggcactcagtcttccaacgg

SEQ ID NO: 21421 - DNA, 23 bp, Homo sapiens
cccgggcactcagtcttccaacg

SEQ ID NO: 21422 - DNA, 23 bp, Homo sapiens
ccccgggcactcagtcttccaac

SEQ ID NO: 21423 - DNA, 23 bp, Homo sapiens
gccccgggcactcagtcttccaa

SEQ ID NO: 21424 - DNA, 23 bp, Homo sapiens
tgccccgggcactcagtcttcca

SEQ ID NO: 21425 - DNA, 23 bp, Homo sapiens
gtgccccgggcactcagtcttcc

SEQ ID NO: 21426 - DNA, 23 bp, Homo sapiens
cgtgccccgggcactcagtcttc

SEQ ID NO: 21427 - DNA, 23 bp, Homo sapiens
ccgtgccccgggcactcagtctt

SEQ ID NO: 21428 - DNA, 23 bp, Homo sapiens
gccgtgccccgggcactcagtct

SEQ ID NO: 21429 - DNA, 23 bp, Homo sapiens
tgccgtgccccgggcactcagtc

SEQ ID NO: 21430 - DNA, 23 bp, Homo sapiens
gtgccgtgccccgggcactcagt

SEQ ID NO: 21431 - DNA, 23 bp, Homo sapiens
tgtgccgtgccccgggcactcag

SEQ ID NO: 21432 - DNA, 23 bp, Homo sapiens
ctgtgccgtgccccgggcactca

SEQ ID NO: 21433 - DNA, 23 bp, Homo sapiens
tctgtgccgtgccccgggcactc

SEQ ID NO: 21434 - DNA, 23 bp, Homo sapiens
ttctgtgccgtgccccgggcact

SEQ ID NO: 21435 - DNA, 23 bp, Homo sapiens
cttctgtgccgtgccccgggcac

SEQ ID NO: 21436 - DNA, 23 bp, Homo sapiens
gcttctgtgccgtgccccgggca

SEQ ID NO: 21437 - DNA, 23 bp, Homo sapiens
ggcttctgtgccgtgccccgggc

SEQ ID NO: 21438 - DNA, 23 bp, Homo sapiens
cggcttctgtgccgtgccccggg

SEQ ID NO: 21439 - DNA, 23 bp, Homo sapiens
gcggcttctgtgccgtgccccgg

SEQ ID NO: 21440 - DNA, 23 bp, Homo sapiens
cgcggcttctgtgccgtgccccg

SEQ ID NO: 21441 - DNA, 23 bp, Homo sapiens
gcgcggcttctgtgccgtgcccc

SEQ ID NO: 21442 - DNA, 23 bp, Homo sapiens
ggcgcggcttctgtgccgtgccc

SEQ ID NO: 21443 - DNA, 23 bp, Homo sapiens
gggcgcggcttctgtgccgtgcc

SEQ ID NO: 21444 - DNA, 23 bp, Homo sapiens
tgggcgcggcttctgtgccgtgc

SEQ ID NO: 21445 - DNA, 23 bp, Homo sapiens
gtgggcgcggcttctgtgccgtg

SEQ ID NO: 21446 - DNA, 23 bp, Homo sapiens
ggtgggcgcggcttctgtgccgt

SEQ ID NO: 21447 - DNA, 23 bp, Homo sapiens
cggtgggcgcggcttctgtgccg

SEQ ID NO: 21448 - DNA, 23 bp, Homo sapiens
gcggtgggcgcggcttctgtgcc

SEQ ID NO: 21449 - DNA, 23 bp, Homo sapiens
ggcggtgggcgcggcttctgtgc

SEQ ID NO: 21450 - DNA, 23 bp, Homo sapiens
aggcggtgggcgcggcttctgtg

SEQ ID NO: 21451 - DNA, 23 bp, Homo sapiens
caggcggtgggcgcggcttctgt

SEQ ID NO: 21452 - DNA, 23 bp, Homo sapiens
gcaggcggtgggcgcggcttctg

SEQ ID NO: 21453 - DNA, 23 bp, Homo sapiens
ggcaggcggtgggcgcggcttct

SEQ ID NO: 21454 - DNA, 23 bp, Homo sapiens
tggcaggcggtgggcgcggcttc

SEQ ID NO: 21455 - DNA, 23 bp, Homo sapiens
ctggcaggcggtgggcgcggctt

SEQ ID NO: 21456 - DNA, 23 bp, Homo sapiens
actggcaggcggtgggcgcggct

SEQ ID NO: 21457 - DNA, 23 bp, Homo sapiens
aactggcaggcggtgggcgcggc

SEQ ID NO: 21458 - DNA, 23 bp, Homo sapiens
gaactggcaggcggtgggcgcgg

SEQ ID NO: 21459 - DNA, 23 bp, Homo sapiens
tgaactggcaggcggtgggcgcg

SEQ ID NO: 21460 - DNA, 23 bp, Homo sapiens
gtgaactggcaggcggtgggcgc

SEQ ID NO: 21461 - DNA, 23 bp, Homo sapiens
tgtgaactggcaggcggtgggcg

SEQ ID NO: 21462 - DNA, 23 bp, Homo sapiens
ttgtgaactggcaggcggtgggc

SEQ ID NO: 21463 - DNA, 23 bp, Homo sapiens
gttgtgaactggcaggcggtggg

SEQ ID NO: 21464 - DNA, 23 bp, Homo sapiens
ggttgtgaactggcaggcggtgg

SEQ ID NO: 21465 - DNA, 23 bp, Homo sapiens
cggttgtgaactggcaggcggtg

SEQ ID NO: 21466 - DNA, 23 bp, Homo sapiens
gcggttgtgaactggcaggcggt

SEQ ID NO: 21467 - DNA, 23 bp, Homo sapiens
agcggttgtgaactggcaggcgg

SEQ ID NO: 21468 - DNA, 23 bp, Homo sapiens
gagcggttgtgaactggcaggcg

SEQ ID NO: 21469 - DNA, 23 bp, Homo sapiens
ggagcggttgtgaactggcaggc

SEQ ID NO: 21470 - DNA, 23 bp, Homo sapiens
cggagcggttgtgaactggcagg

SEQ ID NO: 21471 - DNA, 23 bp, Homo sapiens
tcggagcggttgtgaactggcag

SEQ ID NO: 21472 - DNA, 23 bp, Homo sapiens
ctcggagcggttgtgaactggca

SEQ ID NO: 21473 - DNA, 23 bp, Homo sapiens
gctcggagcggttgtgaactggc

SEQ ID NO: 21474 - DNA, 23 bp, Homo sapiens
cgctcggagcggttgtgaactgg

SEQ ID NO: 21475 - DNA, 23 bp, Homo sapiens
acgctcggagcggttgtgaactg

SEQ ID NO: 21476 - DNA, 23 bp, Homo sapiens
cacgctcggagcggttgtgaact

SEQ ID NO: 21477 - DNA, 23 bp, Homo sapiens
ccacgctcggagcggttgtgaac

SEQ ID NO: 21478 - DNA, 23 bp, Homo sapiens
cccacgctcggagcggttgtgaa

SEQ ID NO: 21479 - DNA, 23 bp, Homo sapiens
acccacgctcggagcggttgtga

SEQ ID NO: 21480 - DNA, 23 bp, Homo sapiens
gacccacgctcggagcggttgtg

SEQ ID NO: 21481 - DNA, 23 bp, Homo sapiens
agacccacgctcggagcggttgt

SEQ ID NO: 21482 - DNA, 23 bp, Homo sapiens
gagacccacgctcggagcggttg

SEQ ID NO: 21483 - DNA, 23 bp, Homo sapiens
ggagacccacgctcggagcggtt

SEQ ID NO: 21484 - DNA, 23 bp, Homo sapiens
cggagacccacgctcggagcggt

SEQ ID NO: 21485 - DNA, 23 bp, Homo sapiens
gcggagacccacgctcggagcgg

SEQ ID NO: 21486 - DNA, 23 bp, Homo sapiens
ggcggagacccacgctcggagcg

SEQ ID NO: 21487 - DNA, 23 bp, Homo sapiens
gggcggagacccacgctcggagc

SEQ ID NO: 21488 - DNA, 23 bp, Homo sapiens
tgggcggagacccacgctcggag

SEQ ID NO: 21489 - DNA, 23 bp, Homo sapiens
ctgggcggagacccacgctcgga

SEQ ID NO: 21490 - DNA, 23 bp, Homo sapiens
gctgggcggagacccacgctcgg

SEQ ID NO: 21491 - DNA, 23 bp, Homo sapiens
agctgggcggagacccacgctcg

SEQ ID NO: 21492 - DNA, 23 bp, Homo sapiens
gagctgggcggagacccacgctc

SEQ ID NO: 21493 - DNA, 23 bp, Homo sapiens
ggagctgggcggagacccacgct

SEQ ID NO: 21494 - DNA, 23 bp, Homo sapiens
tggagctgggcggagacccacgc

SEQ ID NO: 21495 - DNA, 23 bp, Homo sapiens
ctggagctgggcggagacccacg

SEQ ID NO: 21496 - DNA, 23 bp, Homo sapiens
actggagctgggcggagacccac

SEQ ID NO: 21497 - DNA, 23 bp, Homo sapiens
gactggagctgggcggagaccca

SEQ ID NO: 21498 - DNA, 23 bp, Homo sapiens
ggactggagctgggcggagaccc

SEQ ID NO: 21499 - DNA, 23 bp, Homo sapiens
aggactggagctgggcggagacc

SEQ ID NO: 21500 - DNA, 23 bp, Homo sapiens
caggactggagctgggcggagac

SEQ ID NO: 21501 - DNA, 23 bp, Homo sapiens
acaggactggagctgggcggaga

SEQ ID NO: 21502 - DNA, 23 bp, Homo sapiens
cacaggactggagctgggcggag

SEQ ID NO: 21503 - DNA, 23 bp, Homo sapiens
tcacaggactggagctgggcgga

SEQ ID NO: 21504 - DNA, 23 bp, Homo sapiens
atcacaggactggagctgggcgg

SEQ ID NO: 21505 - DNA, 23 bp, Homo sapiens
gatcacaggactggagctgggcg

SEQ ID NO: 21506 - DNA, 23 bp, Homo sapiens
ggatcacaggactggagctgggc

SEQ ID NO: 21507 - DNA, 23 bp, Homo sapiens
cggatcacaggactggagctggg

SEQ ID NO: 21508 - DNA, 23 bp, Homo sapiens
ccggatcacaggactggagctgg

SEQ ID NO: 21509 - DNA, 23 bp, Homo sapiens
cccggatcacaggactggagctg

SEQ ID NO: 21510 - DNA, 23 bp, Homo sapiens
gcccggatcacaggactggagct

SEQ ID NO: 21511 - DNA, 23 bp, Homo sapiens
ggcccggatcacaggactggagc

SEQ ID NO: 21512 - DNA, 23 bp, Homo sapiens
gggcccggatcacaggactggag

SEQ ID NO: 21513 - DNA, 23 bp, Homo sapiens
cgggcccggatcacaggactgga

SEQ ID NO: 21514 - DNA, 23 bp, Homo sapiens
gcgggcccggatcacaggactgg

SEQ ID NO: 21515 - DNA, 23 bp, Homo sapiens
ggcgggcccggatcacaggactg

SEQ ID NO: 21516 - DNA, 23 bp, Homo sapiens
gggcgggcccggatcacaggact

SEQ ID NO: 21517 - DNA, 23 bp, Homo sapiens
ggggcgggcccggatcacaggac

SEQ ID NO: 21518 - DNA, 23 bp, Homo sapiens
gggggcgggcccggatcacagga

SEQ ID NO: 21519 - DNA, 23 bp, Homo sapiens
agggggcgggcccggatcacagg

SEQ ID NO: 21520 - DNA, 23 bp, Homo sapiens
tagggggcgggcccggatcacag

SEQ ID NO: 21521 - DNA, 23 bp, Homo sapiens
ctagggggcgggcccggatcaca

SEQ ID NO: 21522 - DNA, 23 bp, Homo sapiens
gctagggggcgggcccggatcac

SEQ ID NO: 21523 - DNA, 23 bp, Homo sapiens
cgctagggggcgggcccggatca

SEQ ID NO: 21524 - DNA, 23 bp, Homo sapiens
ccgctagggggcgggcccggatc

SEQ ID NO: 21525 - DNA, 23 bp, Homo sapiens
gccgctagggggcgggcccggat

SEQ ID NO: 21526 - DNA, 23 bp, Homo sapiens
ggccgctagggggcgggcccgga

SEQ ID NO: 21527 - DNA, 23 bp, Homo sapiens
cggccgctagggggcgggcccgg

SEQ ID NO: 21528 - DNA, 23 bp, Homo sapiens
ccggccgctagggggcgggcccg

SEQ ID NO: 21529 - DNA, 23 bp, Homo sapiens
cccggccgctagggggcgggccc

SEQ ID NO: 21530 - DNA, 23 bp, Homo sapiens
ccccggccgctagggggcgggcc

SEQ ID NO: 21531 - DNA, 23 bp, Homo sapiens
tccccggccgctagggggcgggc

SEQ ID NO: 21532 - DNA, 23 bp, Homo sapiens
ctccccggccgctagggggcggg

SEQ ID NO: 21533 - DNA, 23 bp, Homo sapiens
cctccccggccgctagggggcgg

SEQ ID NO: 21534 - DNA, 23 bp, Homo sapiens
ccctccccggccgctagggggcg

SEQ ID NO: 21535 - DNA, 23 bp, Homo sapiens
tccctccccggccgctagggggc

SEQ ID NO: 21536 - DNA, 23 bp, Homo sapiens
ctccctccccggccgctaggggg

SEQ ID NO: 21537 - DNA, 23 bp, Homo sapiens
cctccctccccggccgctagggg

SEQ ID NO: 21538 - DNA, 23 bp, Homo sapiens
ccctccctccccggccgctaggg

SEQ ID NO: 21539 - DNA, 23 bp, Homo sapiens
cccctccctccccggccgctagg

SEQ ID NO: 21540 - DNA, 23 bp, Homo sapiens
gcccctccctccccggccgctag

SEQ ID NO: 21541 - DNA, 23 bp, Homo sapiens
ggcccctccctccccggccgcta

SEQ ID NO: 21542 - DNA, 23 bp, Homo sapiens
cggcccctccctccccggccgct

SEQ ID NO: 21543 - DNA, 23 bp, Homo sapiens
ccggcccctccctccccggccgc

SEQ ID NO: 21544 - DNA, 23 bp, Homo sapiens
cccggcccctccctccccggccg

SEQ ID NO: 21545 - DNA, 23 bp, Homo sapiens
acccggcccctccctccccggcc

SEQ ID NO: 21546 - DNA, 23 bp, Homo sapiens
gacccggcccctccctccccggc

SEQ ID NO: 21547 - DNA, 23 bp, Homo sapiens
ggacccggcccctccctccccgg

SEQ ID NO: 21548 - DNA, 23 bp, Homo sapiens
cggacccggcccctccctccccg

SEQ ID NO: 21549 - DNA, 23 bp, Homo sapiens
gcggacccggcccctccctcccc

SEQ ID NO: 21550 - DNA, 23 bp, Homo sapiens
cgcggacccggcccctccctccc

SEQ ID NO: 21551 - DNA, 23 bp, Homo sapiens
ccgcggacccggcccctccctcc

SEQ ID NO: 21552 - DNA, 23 bp, Homo sapiens
gccgcggacccggcccctccctc

SEQ ID NO: 21553 - DNA, 23 bp, Homo sapiens
ggccgcggacccggcccctccct

SEQ ID NO: 21554 - DNA, 23 bp, Homo sapiens
cggccgcggacccggcccctccc

SEQ ID NO: 21555 - DNA, 23 bp, Homo sapiens
ccggccgcggacccggcccctcc

SEQ ID NO: 21556 - DNA, 23 bp, Homo sapiens
gccggccgcggacccggcccctc

SEQ ID NO: 21557 - DNA, 23 bp, Homo sapiens
cgccggccgcggacccggcccct

SEQ ID NO: 21558 - DNA, 23 bp, Homo sapiens
tcgccggccgcggacccggcccc

SEQ ID NO: 21559 - DNA, 23 bp, Homo sapiens
ttcgccggccgcggacccggccc

SEQ ID NO: 21560 - DNA, 23 bp, Homo sapiens
gttcgccggccgcggacccggcc

SEQ ID NO: 21561 - DNA, 23 bp, Homo sapiens
cgttcgccggccgcggacccggc

SEQ ID NO: 21562 - DNA, 23 bp, Homo sapiens
ccgttcgccggccgcggacccgg

SEQ ID NO: 21563 - DNA, 23 bp, Homo sapiens
cccgttcgccggccgcggacccg

SEQ ID NO: 21564 - DNA, 23 bp, Homo sapiens
ccccgttcgccggccgcggaccc

SEQ ID NO: 21565 - DNA, 23 bp, Homo sapiens
gccccgttcgccggccgcggacc

SEQ ID NO: 21566 - DNA, 23 bp, Homo sapiens
agccccgttcgccggccgcggac

SEQ ID NO: 21567 - DNA, 23 bp, Homo sapiens
gagccccgttcgccggccgcgga

SEQ ID NO: 21568 - DNA, 23 bp, Homo sapiens
cgagccccgttcgccggccgcgg

SEQ ID NO: 21569 - DNA, 23 bp, Homo sapiens
tcgagccccgttcgccggccgcg

SEQ ID NO: 21570 - DNA, 23 bp, Homo sapiens
ttcgagccccgttcgccggccgc

SEQ ID NO: 21571 - DNA, 23 bp, Homo sapiens
cttcgagccccgttcgccggccg

SEQ ID NO: 21572 - DNA, 23 bp, Homo sapiens
ccttcgagccccgttcgccggcc

SEQ ID NO: 21573 - DNA, 23 bp, Homo sapiens
cccttcgagccccgttcgccggc

SEQ ID NO: 21574 - DNA, 23 bp, Homo sapiens
acccttcgagccccgttcgccgg

SEQ ID NO: 21575 - DNA, 23 bp, Homo sapiens
gacccttcgagccccgttcgccg

SEQ ID NO: 21576 - DNA, 23 bp, Homo sapiens
ggacccttcgagccccgttcgcc

SEQ ID NO: 21577 - DNA, 23 bp, Homo sapiens
aggacccttcgagccccgttcgc

SEQ ID NO: 21578 - DNA, 23 bp, Homo sapiens
aaggacccttcgagccccgttcg

SEQ ID NO: 21579 - DNA, 23 bp, Homo sapiens
caaggacccttcgagccccgttc

SEQ ID NO: 21580 - DNA, 23 bp, Homo sapiens
acaaggacccttcgagccccgtt

SEQ ID NO: 21581 - DNA, 23 bp, Homo sapiens
tacaaggacccttcgagccccgt

SEQ ID NO: 21582 - DNA, 23 bp, Homo sapiens
ctacaaggacccttcgagccccg

SEQ ID NO: 21583 - DNA, 23 bp, Homo sapiens
gctacaaggacccttcgagcccc

SEQ ID NO: 21584 - DNA, 23 bp, Homo sapiens
ggctacaaggacccttcgagccc

SEQ ID NO: 21585 - DNA, 23 bp, Homo sapiens
cggctacaaggacccttcgagcc

SEQ ID NO: 21586 - DNA, 23 bp, Homo sapiens
ccggctacaaggacccttcgagc

SEQ ID NO: 21587 - DNA, 23 bp, Homo sapiens
cccggctacaaggacccttcgag

SEQ ID NO: 21588 - DNA, 23 bp, Homo sapiens
tcccggctacaaggacccttcga

SEQ ID NO: 21589 - DNA, 23 bp, Homo sapiens
ttcccggctacaaggacccttcg

SEQ ID NO: 21590 - DNA, 23 bp, Homo sapiens
attcccggctacaaggacccttc

SEQ ID NO: 21591 - DNA, 23 bp, Homo sapiens
cattcccggctacaaggaccctt

SEQ ID NO: 21592 - DNA, 23 bp, Homo sapiens
gcattcccggctacaaggaccct

SEQ ID NO: 21593 - DNA, 23 bp, Homo sapiens
agcattcccggctacaaggaccc

SEQ ID NO: 21594 - DNA, 23 bp, Homo sapiens
cagcattcccggctacaaggacc

SEQ ID NO: 21595 - DNA, 23 bp, Homo sapiens
gcagcattcccggctacaaggac

SEQ ID NO: 21596 - DNA, 23 bp, Homo sapiens
agcagcattcccggctacaagga

SEQ ID NO: 21597 - DNA, 23 bp, Homo sapiens
cagcagcattcccggctacaagg

SEQ ID NO: 21598 - DNA, 23 bp, Homo sapiens
gcagcagcattcccggctacaag

SEQ ID NO: 21599 - DNA, 23 bp, Homo sapiens
agcagcagcattcccggctacaa

SEQ ID NO: 21600 - DNA, 23 bp, Homo sapiens
cagcagcagcattcccggctaca

SEQ ID NO: 21601 - DNA, 23 bp, Homo sapiens
gcagcagcagcattcccggctac

SEQ ID NO: 21602 - DNA, 23 bp, Homo sapiens
agcagcagcagcattcccggcta

SEQ ID NO: 21603 - DNA, 23 bp, Homo sapiens
cagcagcagcagcattcccggct

SEQ ID NO: 21604 - DNA, 23 bp, Homo sapiens
gcagcagcagcagcattcccggc

SEQ ID NO: 21605 - DNA, 23 bp, Homo sapiens
agcagcagcagcagcattcccgg

SEQ ID NO: 21606 - DNA, 23 bp, Homo sapiens
cagcagcagcagcagcattcccg

SEQ ID NO: 21607 - DNA, 23 bp, Homo sapiens
gcagcagcagcagcagcattccc

SEQ ID NO: 21608 - DNA, 23 bp, Homo sapiens
agcagcagcagcagcagcattcc

SEQ ID NO: 21609 - DNA, 23 bp, Homo sapiens
cagcagcagcagcagcagcattc

SEQ ID NO: 21610 - DNA, 23 bp, Homo sapiens
gcagcagcagcagcagcagcatt

SEQ ID NO: 21611 - DNA, 23 bp, Homo sapiens
agcagcagcagcagcagcagcat

SEQ ID NO: 21612 - DNA, 23 bp, Homo sapiens
cagcagcagcagcagcagcagca

SEQ ID NO: 21613 - DNA, 23 bp, Homo sapiens
gcagcagcagcagcagcagcagc

SEQ ID NO: 21614 - DNA, 23 bp, Homo sapiens
agcagcagcagcagcagcagcag

SEQ ID NO: 21615 - DNA, 23 bp, Homo sapiens
ccagcagcagcagcagcagcagc

SEQ ID NO: 21616 - DNA, 23 bp, Homo sapiens
cccagcagcagcagcagcagcag

SEQ ID NO: 21617 - DNA, 23 bp, Homo sapiens
ccccagcagcagcagcagcagca

SEQ ID NO: 21618 - DNA, 23 bp, Homo sapiens
cccccagcagcagcagcagcagc

SEQ ID NO: 21619 - DNA, 23 bp, Homo sapiens
ccccccagcagcagcagcagcag

SEQ ID NO: 21620 - DNA, 23 bp, Homo sapiens
tccccccagcagcagcagcagca

SEQ ID NO: 21621 - DNA, 23 bp, Homo sapiens
atccccccagcagcagcagcagc

SEQ ID NO: 21622 - DNA, 23 bp, Homo sapiens
gatccccccagcagcagcagcag

SEQ ID NO: 21623 - DNA, 23 bp, Homo sapiens
tgatccccccagcagcagcagca

SEQ ID NO: 21624 - DNA, 23 bp, Homo sapiens
gtgatccccccagcagcagcagc

SEQ ID NO: 21625 - DNA, 23 bp, Homo sapiens
tgtgatccccccagcagcagcag

SEQ ID NO: 21626 - DNA, 23 bp, Homo sapiens
ctgtgatccccccagcagcagca

SEQ ID NO: 21627 - DNA, 23 bp, Homo sapiens
tctgtgatccccccagcagcagc

SEQ ID NO: 21628 - DNA, 23 bp, Homo sapiens
gtctgtgatccccccagcagcag

SEQ ID NO: 21629 - DNA, 23 bp, Homo sapiens
ggtctgtgatccccccagcagca

SEQ ID NO: 21630 - DNA, 23 bp, Homo sapiens
tggtctgtgatccccccagcagc

SEQ ID NO: 21631 - DNA, 23 bp, Homo sapiens
atggtctgtgatccccccagcag

SEQ ID NO: 21632 - DNA, 23 bp, Homo sapiens
aatggtctgtgatccccccagca

SEQ ID NO: 21633 - DNA, 23 bp, Homo sapiens
aaatggtctgtgatccccccagc

SEQ ID NO: 21634 - DNA, 23 bp, Homo sapiens
gaaatggtctgtgatccccccag

SEQ ID NO: 21635 - DNA, 23 bp, Homo sapiens
agaaatggtctgtgatcccccca

SEQ ID NO: 21636 - DNA, 23 bp, Homo sapiens
aagaaatggtctgtgatcccccc

SEQ ID NO: 21637 - DNA, 23 bp, Homo sapiens
aaagaaatggtctgtgatccccc

SEQ ID NO: 21638 - DNA, 23 bp, Homo sapiens
gaaagaaatggtctgtgatcccc

SEQ ID NO: 21639 - DNA, 23 bp, Homo sapiens
agaaagaaatggtctgtgatccc

SEQ ID NO: 21640 - DNA, 23 bp, Homo sapiens
aagaaagaaatggtctgtgatcc

SEQ ID NO: 21641 - DNA, 23 bp, Homo sapiens
aaagaaagaaatggtctgtgatc

SEQ ID NO: 21642 - DNA, 23 bp, Homo sapiens
gaaagaaagaaatggtctgtgat

SEQ ID NO: 21643 - DNA, 23 bp, Homo sapiens
cgaaagaaagaaatggtctgtga

SEQ ID NO: 21644 - DNA, 23 bp, Homo sapiens
ccgaaagaaagaaatggtctgtg

SEQ ID NO: 21645 - DNA, 23 bp, Homo sapiens
gccgaaagaaagaaatggtctgt

SEQ ID NO: 21646 - DNA, 23 bp, Homo sapiens
ggccgaaagaaagaaatggtctg

SEQ ID NO: 21647 - DNA, 23 bp, Homo sapiens
tggccgaaagaaagaaatggtct

SEQ ID NO: 21648 - DNA, 23 bp, Homo sapiens
ctggccgaaagaaagaaatggtc

SEQ ID NO: 21649 - DNA, 23 bp, Homo sapiens
cctggccgaaagaaagaaatggt

SEQ ID NO: 21650 - DNA, 23 bp, Homo sapiens
gcctggccgaaagaaagaaatgg

SEQ ID NO: 21651 - DNA, 23 bp, Homo sapiens
agcctggccgaaagaaagaaatg

SEQ ID NO: 21652 - DNA, 23 bp, Homo sapiens
cagcctggccgaaagaaagaaat

SEQ ID NO: 21653 - DNA, 23 bp, Homo sapiens
tcagcctggccgaaagaaagaaa

SEQ ID NO: 21654 - DNA, 23 bp, Homo sapiens
ctcagcctggccgaaagaaagaa

SEQ ID NO: 21655 - DNA, 23 bp, Homo sapiens
cctcagcctggccgaaagaaaga

SEQ ID NO: 21656 - DNA, 23 bp, Homo sapiens
gcctcagcctggccgaaagaaag

SEQ ID NO: 21657 - DNA, 23 bp, Homo sapiens
ggcctcagcctggccgaaagaaa

SEQ ID NO: 21658 - DNA, 23 bp, Homo sapiens
gggcctcagcctggccgaaagaa

SEQ ID NO: 21659 - DNA, 23 bp, Homo sapiens
agggcctcagcctggccgaaaga

SEQ ID NO: 21660 - DNA, 23 bp, Homo sapiens
cagggcctcagcctggccgaaag

SEQ ID NO: 21661 - DNA, 23 bp, Homo sapiens
tcagggcctcagcctggccgaaa

SEQ ID NO: 21662 - DNA, 23 bp, Homo sapiens
gtcagggcctcagcctggccgaa

SEQ ID NO: 21663 - DNA, 23 bp, Homo sapiens
cgtcagggcctcagcctggccga

SEQ ID NO: 21664 - DNA, 23 bp, Homo sapiens
acgtcagggcctcagcctggccg

SEQ ID NO: 21665 - DNA, 23 bp, Homo sapiens
cacgtcagggcctcagcctggcc

SEQ ID NO: 21666 - DNA, 23 bp, Homo sapiens
ccacgtcagggcctcagcctggc

SEQ ID NO: 21667 - DNA, 23 bp, Homo sapiens
tccacgtcagggcctcagcctgg

SEQ ID NO: 21668 - DNA, 23 bp, Homo sapiens
atccacgtcagggcctcagcctg

SEQ ID NO: 21669 - DNA, 23 bp, Homo sapiens
catccacgtcagggcctcagcct

SEQ ID NO: 21670 - DNA, 23 bp, Homo sapiens
ccatccacgtcagggcctcagcc

SEQ ID NO: 21671 - DNA, 23 bp, Homo sapiens
cccatccacgtcagggcctcagc

SEQ ID NO: 21672 - DNA, 23 bp, Homo sapiens
gcccatccacgtcagggcctcag

SEQ ID NO: 21673 - DNA, 23 bp, Homo sapiens
tgcccatccacgtcagggcctca

SEQ ID NO: 21674 - DNA, 23 bp, Homo sapiens
ttgcccatccacgtcagggcctc

SEQ ID NO: 21675 - DNA, 23 bp, Homo sapiens
tttgcccatccacgtcagggcct

SEQ ID NO: 21676 - DNA, 23 bp, Homo sapiens
gtttgcccatccacgtcagggcc

SEQ ID NO: 21677 - DNA, 23 bp, Homo sapiens
agtttgcccatccacgtcagggc

SEQ ID NO: 21678 - DNA, 23 bp, Homo sapiens
cagtttgcccatccacgtcaggg

SEQ ID NO: 21679 - DNA, 23 bp, Homo sapiens
gcagtttgcccatccacgtcagg

SEQ ID NO: 21680 - DNA, 23 bp, Homo sapiens
tgcagtttgcccatccacgtcag

SEQ ID NO: 21681 - DNA, 23 bp, Homo sapiens
ctgcagtttgcccatccacgtca

SEQ ID NO: 21682 - DNA, 23 bp, Homo sapiens
cctgcagtttgcccatccacgtc

SEQ ID NO: 21683 - DNA, 23 bp, Homo sapiens
gcctgcagtttgcccatccacgt

SEQ ID NO: 21684 - DNA, 23 bp, Homo sapiens
ggcctgcagtttgcccatccacg

SEQ ID NO: 21685 - DNA, 23 bp, Homo sapiens
aggcctgcagtttgcccatccac

SEQ ID NO: 21686 - DNA, 23 bp, Homo sapiens
caggcctgcagtttgcccatcca

SEQ ID NO: 21687 - DNA, 23 bp, Homo sapiens
ccaggcctgcagtttgcccatcc

SEQ ID NO: 21688 - DNA, 23 bp, Homo sapiens
cccaggcctgcagtttgcccatc

SEQ ID NO: 21689 - DNA, 23 bp, Homo sapiens
tcccaggcctgcagtttgcccat

SEQ ID NO: 21690 - DNA, 23 bp, Homo sapiens
ttcccaggcctgcagtttgccca

SEQ ID NO: 21691 - DNA, 23 bp, Homo sapiens
cttcccaggcctgcagtttgccc

SEQ ID NO: 21692 - DNA, 23 bp, Homo sapiens
ccttcccaggcctgcagtttgcc

SEQ ID NO: 21693 - DNA, 23 bp, Homo sapiens
gccttcccaggcctgcagtttgc

SEQ ID NO: 21694 - DNA, 23 bp, Homo sapiens
tgccttcccaggcctgcagtttg

SEQ ID NO: 21695 - DNA, 23 bp, Homo sapiens
ctgccttcccaggcctgcagttt

SEQ ID NO: 21696 - DNA, 23 bp, Homo sapiens
gctgccttcccaggcctgcagtt

SEQ ID NO: 21697 - DNA, 23 bp, Homo sapiens
tgctgccttcccaggcctgcagt

SEQ ID NO: 21698 - DNA, 23 bp, Homo sapiens
ttgctgccttcccaggcctgcag

SEQ ID NO: 21699 - DNA, 23 bp, Homo sapiens
cttgctgccttcccaggcctgca

SEQ ID NO: 21700 - DNA, 23 bp, Homo sapiens
gcttgctgccttcccaggcctgc

SEQ ID NO: 21701 - DNA, 23 bp, Homo sapiens
ggcttgctgccttcccaggcctg

SEQ ID NO: 21702 - DNA, 23 bp, Homo sapiens
cggcttgctgccttcccaggcct

SEQ ID NO: 21703 - DNA, 23 bp, Homo sapiens
ccggcttgctgccttcccaggcc

SEQ ID NO: 21704 - DNA, 23 bp, Homo sapiens
cccggcttgctgccttcccaggc

SEQ ID NO: 21705 - DNA, 23 bp, Homo sapiens
gcccggcttgctgccttcccagg

SEQ ID NO: 21706 - DNA, 23 bp, Homo sapiens
ggcccggcttgctgccttcccag

SEQ ID NO: 21707 - DNA, 23 bp, Homo sapiens
cggcccggcttgctgccttccca

SEQ ID NO: 21708 - DNA, 23 bp, Homo sapiens
acggcccggcttgctgccttccc

SEQ ID NO: 21709 - DNA, 23 bp, Homo sapiens
gacggcccggcttgctgccttcc

SEQ ID NO: 21710 - DNA, 23 bp, Homo sapiens
ggacggcccggcttgctgccttc

SEQ ID NO: 21711 - DNA, 23 bp, Homo sapiens
cggacggcccggcttgctgcctt

SEQ ID NO: 21712 - DNA, 23 bp, Homo sapiens
acggacggcccggcttgctgcct

SEQ ID NO: 21713 - DNA, 23 bp, Homo sapiens
cacggacggcccggcttgctgcc

SEQ ID NO: 21714 - DNA, 23 bp, Homo sapiens
acacggacggcccggcttgctgc

SEQ ID NO: 21715 - DNA, 23 bp, Homo sapiens
aacacggacggcccggcttgctg

SEQ ID NO: 21716 - DNA, 23 bp, Homo sapiens
gaacacggacggcccggcttgct

SEQ ID NO: 21717 - DNA, 23 bp, Homo sapiens
ggaacacggacggcccggcttgc

SEQ ID NO: 21718 - DNA, 23 bp, Homo sapiens
tggaacacggacggcccggcttg

SEQ ID NO: 21719 - DNA, 23 bp, Homo sapiens
atggaacacggacggcccggctt

SEQ ID NO: 21720 - DNA, 23 bp, Homo sapiens
gatggaacacggacggcccggct

SEQ ID NO: 21721 - DNA, 23 bp, Homo sapiens
ggatggaacacggacggcccggc

SEQ ID NO: 21722 - DNA, 23 bp, Homo sapiens
aggatggaacacggacggcccgg

SEQ ID NO: 21723 - DNA, 23 bp, Homo sapiens
gaggatggaacacggacggcccg

SEQ ID NO: 21724 - DNA, 23 bp, Homo sapiens
ggaggatggaacacggacggccc

SEQ ID NO: 21725 - DNA, 23 bp, Homo sapiens
tggaggatggaacacggacggcc

SEQ ID NO: 21726 - DNA, 23 bp, Homo sapiens
gtggaggatggaacacggacggc

SEQ ID NO: 21727 - DNA, 23 bp, Homo sapiens
cgtggaggatggaacacggacgg

SEQ ID NO: 21728 - DNA, 23 bp, Homo sapiens
gcgtggaggatggaacacggacg

SEQ ID NO: 21729 - DNA, 23 bp, Homo sapiens
tgcgtggaggatggaacacggac

SEQ ID NO: 21730 - DNA, 23 bp, Homo sapiens
gtgcgtggaggatggaacacgga

SEQ ID NO: 21731 - DNA, 23 bp, Homo sapiens
ggtgcgtggaggatggaacacgg

SEQ ID NO: 21732 - DNA, 23 bp, Homo sapiens
gggtgcgtggaggatggaacacg

SEQ ID NO: 21733 - DNA, 23 bp, Homo sapiens
ggggtgcgtggaggatggaacac

SEQ ID NO: 21734 - DNA, 23 bp, Homo sapiens
gggggtgcgtggaggatggaaca

SEQ ID NO: 21735 - DNA, 23 bp, Homo sapiens
tgggggtgcgtggaggatggaac

SEQ ID NO: 21736 - DNA, 23 bp, Homo sapiens
gtgggggtgcgtggaggatggaa

SEQ ID NO: 21737 - DNA, 23 bp, Homo sapiens
ggtgggggtgcgtggaggatgga

SEQ ID NO: 21738 - DNA, 23 bp, Homo sapiens
aggtgggggtgcgtggaggatgg

SEQ ID NO: 21739 - DNA, 23 bp, Homo sapiens
taggtgggggtgcgtggaggatg

SEQ ID NO: 21740 - DNA, 23 bp, Homo sapiens
ataggtgggggtgcgtggaggat

SEQ ID NO: 21741 - DNA, 23 bp, Homo sapiens
gataggtgggggtgcgtggagga

SEQ ID NO: 21742 - DNA, 23 bp, Homo sapiens
cgataggtgggggtgcgtggagg

SEQ ID NO: 21743 - DNA, 23 bp, Homo sapiens
acgataggtgggggtgcgtggag

SEQ ID NO: 21744 - DNA, 23 bp, Homo sapiens
aacgataggtgggggtgcgtgga

SEQ ID NO: 21745 - DNA, 23 bp, Homo sapiens
caacgataggtgggggtgcgtgg

SEQ ID NO: 21746 - DNA, 23 bp, Homo sapiens
ccaacgataggtgggggtgcgtg

SEQ ID NO: 21747 - DNA, 23 bp, Homo sapiens
accaacgataggtgggggtgcgt

SEQ ID NO: 21748 - DNA, 23 bp, Homo sapiens
aaccaacgataggtgggggtgcg

SEQ ID NO: 21749 - DNA, 23 bp, Homo sapiens
gaaccaacgataggtgggggtgc

SEQ ID NO: 21750 - DNA, 23 bp, Homo sapiens
cgaaccaacgataggtgggggtg

SEQ ID NO: 21751 - DNA, 23 bp, Homo sapiens
gcgaaccaacgataggtgggggt

SEQ ID NO: 21752 - DNA, 23 bp, Homo sapiens
tgcgaaccaacgataggtggggg

SEQ ID NO: 21753 - DNA, 23 bp, Homo sapiens
ttgcgaaccaacgataggtgggg

SEQ ID NO: 21754 - DNA, 23 bp, Homo sapiens
tttgcgaaccaacgataggtggg

SEQ ID NO: 21755 - DNA, 23 bp, Homo sapiens
ctttgcgaaccaacgataggtgg

SEQ ID NO: 21756 - DNA, 23 bp, Homo sapiens
actttgcgaaccaacgataggtg

SEQ ID NO: 21757 - DNA, 23 bp, Homo sapiens
cactttgcgaaccaacgataggt

SEQ ID NO: 21758 - DNA, 23 bp, Homo sapiens
gcactttgcgaaccaacgatagg

SEQ ID NO: 21759 - DNA, 23 bp, Homo sapiens
tgcactttgcgaaccaacgatag

SEQ ID NO: 21760 - DNA, 23 bp, Homo sapiens
ttgcactttgcgaaccaacgata

SEQ ID NO: 21761 - DNA, 23 bp, Homo sapiens
tttgcactttgcgaaccaacgat

SEQ ID NO: 21762 - DNA, 23 bp, Homo sapiens
ctttgcactttgcgaaccaacga

SEQ ID NO: 21763 - DNA, 23 bp, Homo sapiens
gctttgcactttgcgaaccaacg

SEQ ID NO: 21764 - DNA, 23 bp, Homo sapiens
agctttgcactttgcgaaccaac

SEQ ID NO: 21765 - DNA, 23 bp, Homo sapiens
aagctttgcactttgcgaaccaa

SEQ ID NO: 21766 - DNA, 23 bp, Homo sapiens
aaagctttgcactttgcgaacca

SEQ ID NO: 21767 - DNA, 23 bp, Homo sapiens
gaaagctttgcactttgcgaacc

SEQ ID NO: 21768 - DNA, 23 bp, Homo sapiens
agaaagctttgcactttgcgaac

SEQ ID NO: 21769 - DNA, 23 bp, Homo sapiens
aagaaagctttgcactttgcgaa

SEQ ID NO: 21770 - DNA, 23 bp, Homo sapiens
caagaaagctttgcactttgcga

SEQ ID NO: 21771 - DNA, 23 bp, Homo sapiens
acaagaaagctttgcactttgcg

SEQ ID NO: 21772 - DNA, 23 bp, Homo sapiens
cacaagaaagctttgcactttgc

SEQ ID NO: 21773 - DNA, 23 bp, Homo sapiens
gcacaagaaagctttgcactttg

SEQ ID NO: 21774 - DNA, 23 bp, Homo sapiens
tgcacaagaaagctttgcacttt

SEQ ID NO: 21775 - DNA, 23 bp, Homo sapiens
atgcacaagaaagctttgcactt

SEQ ID NO: 21776 - DNA, 23 bp, Homo sapiens
catgcacaagaaagctttgcact

SEQ ID NO: 21777 - DNA, 23 bp, Homo sapiens
tcatgcacaagaaagctttgcac

SEQ ID NO: 21778 - DNA, 23 bp, Homo sapiens
gtcatgcacaagaaagctttgca

SEQ ID NO: 21779 - DNA, 23 bp, Homo sapiens
cgtcatgcacaagaaagctttgc

SEQ ID NO: 21780 - DNA, 23 bp, Homo sapiens
gcgtcatgcacaagaaagctttg

SEQ ID NO: 21781 - DNA, 23 bp, Homo sapiens
ggcgtcatgcacaagaaagcttt

SEQ ID NO: 21782 - DNA, 23 bp, Homo sapiens
gggcgtcatgcacaagaaagctt

SEQ ID NO: 21783 - DNA, 23 bp, Homo sapiens
agggcgtcatgcacaagaaagct

SEQ ID NO: 21784 - DNA, 23 bp, Homo sapiens
cagggcgtcatgcacaagaaagc

SEQ ID NO: 21785 - DNA, 23 bp, Homo sapiens
gcagggcgtcatgcacaagaaag

SEQ ID NO: 21786 - DNA, 23 bp, Homo sapiens
agcagggcgtcatgcacaagaaa

SEQ ID NO: 21787 - DNA, 23 bp, Homo sapiens
gagcagggcgtcatgcacaagaa

SEQ ID NO: 21788 - DNA, 23 bp, Homo sapiens
agagcagggcgtcatgcacaaga

SEQ ID NO: 21789 - DNA, 23 bp, Homo sapiens
cagagcagggcgtcatgcacaag

SEQ ID NO: 21790 - DNA, 23 bp, Homo sapiens
ccagagcagggcgtcatgcacaa

SEQ ID NO: 21791 - DNA, 23 bp, Homo sapiens
cccagagcagggcgtcatgcaca

SEQ ID NO: 21792 - DNA, 23 bp, Homo sapiens
ccccagagcagggcgtcatgcac

SEQ ID NO: 21793 - DNA, 23 bp, Homo sapiens
tccccagagcagggcgtcatgca

SEQ ID NO: 21794 - DNA, 23 bp, Homo sapiens
ctccccagagcagggcgtcatgc

SEQ ID NO: 21795 - DNA, 23 bp, Homo sapiens
gctccccagagcagggcgtcatg

SEQ ID NO: 21796 - DNA, 23 bp, Homo sapiens
cgctccccagagcagggcgtcat

SEQ ID NO: 21797 - DNA, 23 bp, Homo sapiens
acgctccccagagcagggcgtca

SEQ ID NO: 21798 - DNA, 23 bp, Homo sapiens
gacgctccccagagcagggcgtc

SEQ ID NO: 21799 - DNA, 23 bp, Homo sapiens
agacgctccccagagcagggcgt

SEQ ID NO: 21800 - DNA, 23 bp, Homo sapiens
cagacgctccccagagcagggcg

SEQ ID NO: 21801 - DNA, 23 bp, Homo sapiens
ccagacgctccccagagcagggc

SEQ ID NO: 21802 - DNA, 23 bp, Homo sapiens
gccagacgctccccagagcaggg

SEQ ID NO: 21803 - DNA, 23 bp, Homo sapiens
cgccagacgctccccagagcagg

SEQ ID NO: 21804 - DNA, 23 bp, Homo sapiens
gcgccagacgctccccagagcag

SEQ ID NO: 21805 - DNA, 23 bp, Homo sapiens
cgcgccagacgctccccagagca

SEQ ID NO: 21806 - DNA, 23 bp, Homo sapiens
tcgcgccagacgctccccagagc

SEQ ID NO: 21807 - DNA, 23 bp, Homo sapiens
atcgcgccagacgctccccagag

SEQ ID NO: 21808 - DNA, 23 bp, Homo sapiens
gatcgcgccagacgctccccaga

SEQ ID NO: 21809 - DNA, 23 bp, Homo sapiens
agatcgcgccagacgctccccag

SEQ ID NO: 21810 - DNA, 23 bp, Homo sapiens
gagatcgcgccagacgctcccca

SEQ ID NO: 21811 - DNA, 23 bp, Homo sapiens
agagatcgcgccagacgctcccc

SEQ ID NO: 21812 - DNA, 23 bp, Homo sapiens
cagagatcgcgccagacgctccc

SEQ ID NO: 21813 - DNA, 23 bp, Homo sapiens
gcagagatcgcgccagacgctcc

SEQ ID NO: 21814 - DNA, 23 bp, Homo sapiens
ggcagagatcgcgccagacgctc

SEQ ID NO: 21815 - DNA, 23 bp, Homo sapiens
aggcagagatcgcgccagacgct

SEQ ID NO: 21816 - DNA, 23 bp, Homo sapiens
caggcagagatcgcgccagacgc

SEQ ID NO: 21817 - DNA, 23 bp, Homo sapiens
gcaggcagagatcgcgccagacg

SEQ ID NO: 21818 - DNA, 23 bp, Homo sapiens
agcaggcagagatcgcgccagac

SEQ ID NO: 21819 - DNA, 23 bp, Homo sapiens
aagcaggcagagatcgcgccaga

SEQ ID NO: 21820 - DNA, 23 bp, Homo sapiens
taagcaggcagagatcgcgccag

SEQ ID NO: 21821 - DNA, 23 bp, Homo sapiens
gtaagcaggcagagatcgcgcca

SEQ ID NO: 21822 - DNA, 23 bp, Homo sapiens
agtaagcaggcagagatcgcgcc

SEQ ID NO: 21823 - DNA, 23 bp, Homo sapiens
gagtaagcaggcagagatcgcgc

SEQ ID NO: 21824 - DNA, 23 bp, Homo sapiens
cgagtaagcaggcagagatcgcg

SEQ ID NO: 21825 - DNA, 23 bp, Homo sapiens
ccgagtaagcaggcagagatcgc

SEQ ID NO: 21826 - DNA, 23 bp, Homo sapiens
cccgagtaagcaggcagagatcg

SEQ ID NO: 21827 - DNA, 23 bp, Homo sapiens
tcccgagtaagcaggcagagatc

SEQ ID NO: 21828 - DNA, 23 bp, Homo sapiens
ttcccgagtaagcaggcagagat

SEQ ID NO: 21829 - DNA, 23 bp, Homo sapiens
tttcccgagtaagcaggcagaga

SEQ ID NO: 21830 - DNA, 23 bp, Homo sapiens
atttcccgagtaagcaggcagag

SEQ ID NO: 21831 - DNA, 23 bp, Homo sapiens
aatttcccgagtaagcaggcaga

SEQ ID NO: 21832 - DNA, 23 bp, Homo sapiens
aaatttcccgagtaagcaggcag

SEQ ID NO: 21833 - DNA, 23 bp, Homo sapiens
caaatttcccgagtaagcaggca

SEQ ID NO: 21834 - DNA, 23 bp, Homo sapiens
gcaaatttcccgagtaagcaggc

SEQ ID NO: 21835 - DNA, 23 bp, Homo sapiens
agcaaatttcccgagtaagcagg

SEQ ID NO: 21836 - DNA, 23 bp, Homo sapiens
aagcaaatttcccgagtaagcag

SEQ ID NO: 21837 - DNA, 23 bp, Homo sapiens
aaagcaaatttcccgagtaagca

SEQ ID NO: 21838 - DNA, 23 bp, Homo sapiens
aaaagcaaatttcccgagtaagc

SEQ ID NO: 21839 - DNA, 23 bp, Homo sapiens
caaaagcaaatttcccgagtaag

SEQ ID NO: 21840 - DNA, 23 bp, Homo sapiens
gcaaaagcaaatttcccgagtaa

SEQ ID NO: 21841 - DNA, 23 bp, Homo sapiens
ggcaaaagcaaatttcccgagta

SEQ ID NO: 21842 - DNA, 23 bp, Homo sapiens
tggcaaaagcaaatttcccgagt

SEQ ID NO: 21843 - DNA, 23 bp, Homo sapiens
ttggcaaaagcaaatttcccgag

SEQ ID NO: 21844 - DNA, 23 bp, Homo sapiens
tttggcaaaagcaaatttcccga

SEQ ID NO: 21845 - DNA, 23 bp, Homo sapiens
gtttggcaaaagcaaatttcccg

SEQ ID NO: 21846 - DNA, 23 bp, Homo sapiens
ggtttggcaaaagcaaatttccc

SEQ ID NO: 21847 - DNA, 23 bp, Homo sapiens
gggtttggcaaaagcaaatttcc

SEQ ID NO: 21848 - DNA, 23 bp, Homo sapiens
cgggtttggcaaaagcaaatttc

SEQ ID NO: 21849 - DNA, 23 bp, Homo sapiens
gcgggtttggcaaaagcaaattt

SEQ ID NO: 21850 - DNA, 23 bp, Homo sapiens
agcgggtttggcaaaagcaaatt

SEQ ID NO: 21851 - DNA, 23 bp, Homo sapiens
aagcgggtttggcaaaagcaaat

SEQ ID NO: 21852 - DNA, 23 bp, Homo sapiens
aaagcgggtttggcaaaagcaaa

SEQ ID NO: 21853 - DNA, 23 bp, Homo sapiens
aaaagcgggtttggcaaaagcaa

SEQ ID NO: 21854 - DNA, 23 bp, Homo sapiens
aaaaagcgggtttggcaaaagca

SEQ ID NO: 21855 - DNA, 23 bp, Homo sapiens
gaaaaagcgggtttggcaaaagc

SEQ ID NO: 21856 - DNA, 23 bp, Homo sapiens
cgaaaaagcgggtttggcaaaag

SEQ ID NO: 21857 - DNA, 23 bp, Homo sapiens
ccgaaaaagcgggtttggcaaaa

SEQ ID NO: 21858 - DNA, 23 bp, Homo sapiens
cccgaaaaagcgggtttggcaaa

SEQ ID NO: 21859 - DNA, 23 bp, Homo sapiens
ccccgaaaaagcgggtttggcaa

SEQ ID NO: 21860 - DNA, 23 bp, Homo sapiens
tccccgaaaaagcgggtttggca

SEQ ID NO: 21861 - DNA, 23 bp, Homo sapiens
atccccgaaaaagcgggtttggc

SEQ ID NO: 21862 - DNA, 23 bp, Homo sapiens
gatccccgaaaaagcgggtttgg

SEQ ID NO: 21863 - DNA, 23 bp, Homo sapiens
ggatccccgaaaaagcgggtttg

SEQ ID NO: 21864 - DNA, 23 bp, Homo sapiens
gggatccccgaaaaagcgggttt

SEQ ID NO: 21865 - DNA, 23 bp, Homo sapiens
cgggatccccgaaaaagcgggtt

SEQ ID NO: 21866 - DNA, 23 bp, Homo sapiens
gcgggatccccgaaaaagcgggt

SEQ ID NO: 21867 - DNA, 23 bp, Homo sapiens
cgcgggatccccgaaaaagcggg

SEQ ID NO: 21868 - DNA, 23 bp, Homo sapiens
gcgcgggatccccgaaaaagcgg

SEQ ID NO: 21869 - DNA, 23 bp, Homo sapiens
ggcgcgggatccccgaaaaagcg

SEQ ID NO: 21870 - DNA, 23 bp, Homo sapiens
gggcgcgggatccccgaaaaagc

SEQ ID NO: 21871 - DNA, 23 bp, Homo sapiens
ggggcgcgggatccccgaaaaag

SEQ ID NO: 21872 - DNA, 23 bp, Homo sapiens
gggggcgcgggatccccgaaaaa

SEQ ID NO: 21873 - DNA, 23 bp, Homo sapiens
ggggggcgcgggatccccgaaaa

SEQ ID NO: 21874 - DNA, 23 bp, Homo sapiens
aggggggcgcgggatccccgaaa

SEQ ID NO: 21875 - DNA, 23 bp, Homo sapiens
gaggggggcgcgggatccccgaa

SEQ ID NO: 21876 - DNA, 23 bp, Homo sapiens
ggaggggggcgcgggatccccga

SEQ ID NO: 21877 - DNA, 23 bp, Homo sapiens
aggaggggggcgcgggatccccg

SEQ ID NO: 21878 - DNA, 23 bp, Homo sapiens
gaggaggggggcgcgggatcccc

SEQ ID NO: 21879 - DNA, 23 bp, Homo sapiens
tgaggaggggggcgcgggatccc

SEQ ID NO: 21880 - DNA, 23 bp, Homo sapiens
gtgaggaggggggcgcgggatcc

SEQ ID NO: 21881 - DNA, 23 bp, Homo sapiens
agtgaggaggggggcgcgggatc

SEQ ID NO: 21882 - DNA, 23 bp, Homo sapiens
aagtgaggaggggggcgcgggat

SEQ ID NO: 21883 - DNA, 23 bp, Homo sapiens
caagtgaggaggggggcgcggga

SEQ ID NO: 21884 - DNA, 23 bp, Homo sapiens
gcaagtgaggaggggggcgcggg

SEQ ID NO: 21885 - DNA, 23 bp, Homo sapiens
cgcaagtgaggaggggggcgcgg

SEQ ID NO: 21886 - DNA, 23 bp, Homo sapiens
gcgcaagtgaggaggggggcgcg

SEQ ID NO: 21887 - DNA, 23 bp, Homo sapiens
agcgcaagtgaggaggggggcgc

SEQ ID NO: 21888 - DNA, 23 bp, Homo sapiens
cagcgcaagtgaggaggggggcg

SEQ ID NO: 21889 - DNA, 23 bp, Homo sapiens
gcagcgcaagtgaggaggggggc

SEQ ID NO: 21890 - DNA, 23 bp, Homo sapiens
agcagcgcaagtgaggagggggg

SEQ ID NO: 21891 - DNA, 23 bp, Homo sapiens
gagcagcgcaagtgaggaggggg

SEQ ID NO: 21892 - DNA, 23 bp, Homo sapiens
agagcagcgcaagtgaggagggg

SEQ ID NO: 21893 - DNA, 23 bp, Homo sapiens
gagagcagcgcaagtgaggaggg

SEQ ID NO: 21894 - DNA, 23 bp, Homo sapiens
cgagagcagcgcaagtgaggagg

SEQ ID NO: 21895 - DNA, 23 bp, Homo sapiens
ccgagagcagcgcaagtgaggag

SEQ ID NO: 21896 - DNA, 23 bp, Homo sapiens
tccgagagcagcgcaagtgagga

SEQ ID NO: 21897 - DNA, 23 bp, Homo sapiens
ctccgagagcagcgcaagtgagg

SEQ ID NO: 21898 - DNA, 23 bp, Homo sapiens
gctccgagagcagcgcaagtgag

SEQ ID NO: 21899 - DNA, 23 bp, Homo sapiens
ggctccgagagcagcgcaagtga

SEQ ID NO: 21900 - DNA, 23 bp, Homo sapiens
gggctccgagagcagcgcaagtg

SEQ ID NO: 21901 - DNA, 23 bp, Homo sapiens
ggggctccgagagcagcgcaagt

SEQ ID NO: 21902 - DNA, 23 bp, Homo sapiens
tggggctccgagagcagcgcaag

SEQ ID NO: 21903 - DNA, 23 bp, Homo sapiens
ctggggctccgagagcagcgcaa

SEQ ID NO: 21904 - DNA, 23 bp, Homo sapiens
gctggggctccgagagcagcgca

SEQ ID NO: 21905 - DNA, 23 bp, Homo sapiens
ggctggggctccgagagcagcgc

SEQ ID NO: 21906 - DNA, 23 bp, Homo sapiens
cggctggggctccgagagcagcg

SEQ ID NO: 21907 - DNA, 23 bp, Homo sapiens
ccggctggggctccgagagcagc

SEQ ID NO: 21908 - DNA, 23 bp, Homo sapiens
gccggctggggctccgagagcag

SEQ ID NO: 21909 - DNA, 23 bp, Homo sapiens
agccggctggggctccgagagca

SEQ ID NO: 21910 - DNA, 23 bp, Homo sapiens
gagccggctggggctccgagagc

SEQ ID NO: 21911 - DNA, 23 bp, Homo sapiens
ggagccggctggggctccgagag

SEQ ID NO: 21912 - DNA, 23 bp, Homo sapiens
cggagccggctggggctccgaga

SEQ ID NO: 21913 - DNA, 23 bp, Homo sapiens
gcggagccggctggggctccgag

SEQ ID NO: 21914 - DNA, 23 bp, Homo sapiens
ggcggagccggctggggctccga

SEQ ID NO: 21915 - DNA, 23 bp, Homo sapiens
gggcggagccggctggggctccg

SEQ ID NO: 21916 - DNA, 23 bp, Homo sapiens
cgggcggagccggctggggctcc

SEQ ID NO: 21917 - DNA, 23 bp, Homo sapiens
gcgggcggagccggctggggctc

SEQ ID NO: 21918 - DNA, 23 bp, Homo sapiens
agcgggcggagccggctggggct

SEQ ID NO: 21919 - DNA, 23 bp, Homo sapiens
aagcgggcggagccggctggggc

SEQ ID NO: 21920 - DNA, 23 bp, Homo sapiens
gaagcgggcggagccggctgggg

SEQ ID NO: 21921 - DNA, 23 bp, Homo sapiens
cgaagcgggcggagccggctggg

SEQ ID NO: 21922 - DNA, 23 bp, Homo sapiens
ccgaagcgggcggagccggctgg

SEQ ID NO: 21923 - DNA, 23 bp, Homo sapiens
gccgaagcgggcggagccggctg

SEQ ID NO: 21924 - DNA, 23 bp, Homo sapiens
cgccgaagcgggcggagccggct

SEQ ID NO: 21925 - DNA, 23 bp, Homo sapiens
ccgccgaagcgggcggagccggc

SEQ ID NO: 21926 - DNA, 23 bp, Homo sapiens
accgccgaagcgggcggagccgg

SEQ ID NO: 21927 - DNA, 23 bp, Homo sapiens
aaccgccgaagcgggcggagccg

SEQ ID NO: 21928 - DNA, 23 bp, Homo sapiens
aaaccgccgaagcgggcggagcc

SEQ ID NO: 21929 - DNA, 23 bp, Homo sapiens
caaaccgccgaagcgggcggagc

SEQ ID NO: 21930 - DNA, 23 bp, Homo sapiens
ccaaaccgccgaagcgggcggag

SEQ ID NO: 21931 - DNA, 23 bp, Homo sapiens
tccaaaccgccgaagcgggcgga

SEQ ID NO: 21932 - DNA, 23 bp, Homo sapiens
atccaaaccgccgaagcgggcgg

SEQ ID NO: 21933 - DNA, 23 bp, Homo sapiens
tatccaaaccgccgaagcgggcg

SEQ ID NO: 21934 - DNA, 23 bp, Homo sapiens
atatccaaaccgccgaagcgggc

SEQ ID NO: 21935 - DNA, 23 bp, Homo sapiens
aatatccaaaccgccgaagcggg

SEQ ID NO: 21936 - DNA, 23 bp, Homo sapiens
aaatatccaaaccgccgaagcgg

SEQ ID NO: 21937 - DNA, 23 bp, Homo sapiens
taaatatccaaaccgccgaagcg

SEQ ID NO: 21938 - DNA, 23 bp, Homo sapiens
ataaatatccaaaccgccgaagc

SEQ ID NO: 21939 - DNA, 23 bp, Homo sapiens
aataaatatccaaaccgccgaag

SEQ ID NO: 21940 - DNA, 23 bp, Homo sapiens
caataaatatccaaaccgccgaa

SEQ ID NO: 21941 - DNA, 23 bp, Homo sapiens
tcaataaatatccaaaccgccga

SEQ ID NO: 21942 - DNA, 23 bp, Homo sapiens
gtcaataaatatccaaaccgccg

SEQ ID NO: 21943 - DNA, 23 bp, Homo sapiens
ggtcaataaatatccaaaccgcc

SEQ ID NO: 21944 - DNA, 23 bp, Homo sapiens
aggtcaataaatatccaaaccgc

SEQ ID NO: 21945 - DNA, 23 bp, Homo sapiens
gaggtcaataaatatccaaaccg

SEQ ID NO: 21946 - DNA, 23 bp, Homo sapiens
cgaggtcaataaatatccaaacc

SEQ ID NO: 21947 - DNA, 23 bp, Homo sapiens
acgaggtcaataaatatccaaac

SEQ ID NO: 21948 - DNA, 23 bp, Homo sapiens
gacgaggtcaataaatatccaaa

SEQ ID NO: 21949 - DNA, 23 bp, Homo sapiens
ggacgaggtcaataaatatccaa

SEQ ID NO: 21950 - DNA, 23 bp, Homo sapiens
aggacgaggtcaataaatatcca

SEQ ID NO: 21951 - DNA, 23 bp, Homo sapiens
gaggacgaggtcaataaatatcc

SEQ ID NO: 21952 - DNA, 23 bp, Homo sapiens
ggaggacgaggtcaataaatatc

SEQ ID NO: 21953 - DNA, 23 bp, Homo sapiens
cggaggacgaggtcaataaatat

SEQ ID NO: 21954 - DNA, 23 bp, Homo sapiens
tcggaggacgaggtcaataaata

SEQ ID NO: 21955 - DNA, 23 bp, Homo sapiens
gtcggaggacgaggtcaataaat

SEQ ID NO: 21956 - DNA, 23 bp, Homo sapiens
agtcggaggacgaggtcaataaa

SEQ ID NO: 21957 - DNA, 23 bp, Homo sapiens
gagtcggaggacgaggtcaataa

SEQ ID NO: 21958 - DNA, 23 bp, Homo sapiens
cgagtcggaggacgaggtcaata

SEQ ID NO: 21959 - DNA, 23 bp, Homo sapiens
gcgagtcggaggacgaggtcaat

SEQ ID NO: 21960 - DNA, 23 bp, Homo sapiens
agcgagtcggaggacgaggtcaa

SEQ ID NO: 21961 - DNA, 23 bp, Homo sapiens
cagcgagtcggaggacgaggtca

SEQ ID NO: 21962 - DNA, 23 bp, Homo sapiens
tcagcgagtcggaggacgaggtc

SEQ ID NO: 21963 - DNA, 23 bp, Homo sapiens
gtcagcgagtcggaggacgaggt

SEQ ID NO: 21964 - DNA, 23 bp, Homo sapiens
tgtcagcgagtcggaggacgagg

SEQ ID NO: 21965 - DNA, 23 bp, Homo sapiens
ctgtcagcgagtcggaggacgag

SEQ ID NO: 21966 - DNA, 23 bp, Homo sapiens
cctgtcagcgagtcggaggacga

SEQ ID NO: 21967 - DNA, 23 bp, Homo sapiens
gcctgtcagcgagtcggaggacg

SEQ ID NO: 21968 - DNA, 23 bp, Homo sapiens
agcctgtcagcgagtcggaggac

SEQ ID NO: 21969 - DNA, 23 bp, Homo sapiens
tagcctgtcagcgagtcggagga

SEQ ID NO: 21970 - DNA, 23 bp, Homo sapiens
gtagcctgtcagcgagtcggagg

SEQ ID NO: 21971 - DNA, 23 bp, Homo sapiens
tgtagcctgtcagcgagtcggag

SEQ ID NO: 21972 - DNA, 23 bp, Homo sapiens
ctgtagcctgtcagcgagtcgga

SEQ ID NO: 21973 - DNA, 23 bp, Homo sapiens
cctgtagcctgtcagcgagtcgg

SEQ ID NO: 21974 - DNA, 23 bp, Homo sapiens
tcctgtagcctgtcagcgagtcg

SEQ ID NO: 21975 - DNA, 23 bp, Homo sapiens
gtcctgtagcctgtcagcgagtc

SEQ ID NO: 21976 - DNA, 23 bp, Homo sapiens
ggtcctgtagcctgtcagcgagt

SEQ ID NO: 21977 - DNA, 23 bp, Homo sapiens
gggtcctgtagcctgtcagcgag

SEQ ID NO: 21978 - DNA, 23 bp, Homo sapiens
ggggtcctgtagcctgtcagcga

SEQ ID NO: 21979 - DNA, 23 bp, Homo sapiens
gggggtcctgtagcctgtcagcg

SEQ ID NO: 21980 - DNA, 23 bp, Homo sapiens
tgggggtcctgtagcctgtcagc

SEQ ID NO: 21981 - DNA, 23 bp, Homo sapiens
ttgggggtcctgtagcctgtcag

SEQ ID NO: 21982 - DNA, 23 bp, Homo sapiens
gttgggggtcctgtagcctgtca

SEQ ID NO: 21983 - DNA, 23 bp, Homo sapiens
tgttgggggtcctgtagcctgtc

SEQ ID NO: 21984 - DNA, 23 bp, Homo sapiens
ttgttgggggtcctgtagcctgt

SEQ ID NO: 21985 - DNA, 23 bp, Homo sapiens
gttgttgggggtcctgtagcctg

SEQ ID NO: 21986 - DNA, 23 bp, Homo sapiens
ggttgttgggggtcctgtagcct

SEQ ID NO: 21987 - DNA, 23 bp, Homo sapiens
gggttgttgggggtcctgtagcc

SEQ ID NO: 21988 - DNA, 23 bp, Homo sapiens
ggggttgttgggggtcctgtagc

SEQ ID NO: 21989 - DNA, 23 bp, Homo sapiens
tggggttgttgggggtcctgtag

SEQ ID NO: 21990 - DNA, 23 bp, Homo sapiens
ttggggttgttgggggtcctgta

SEQ ID NO: 21991 - DNA, 23 bp, Homo sapiens
attggggttgttgggggtcctgt

SEQ ID NO: 21992 - DNA, 23 bp, Homo sapiens
gattggggttgttgggggtcctg

SEQ ID NO: 21993 - DNA, 23 bp, Homo sapiens
ggattggggttgttgggggtcct

SEQ ID NO: 21994 - DNA, 23 bp, Homo sapiens
tggattggggttgttgggggtcc

SEQ ID NO: 21995 - DNA, 23 bp, Homo sapiens
gtggattggggttgttgggggtc

SEQ ID NO: 21996 - DNA, 23 bp, Homo sapiens
cgtggattggggttgttgggggt

SEQ ID NO: 21997 - DNA, 23 bp, Homo sapiens
acgtggattggggttgttggggg

SEQ ID NO: 21998 - DNA, 23 bp, Homo sapiens
aacgtggattggggttgttgggg

SEQ ID NO: 21999 - DNA, 23 bp, Homo sapiens
aaacgtggattggggttgttggg

SEQ ID NO: 22000 - DNA, 23 bp, Homo sapiens
aaaacgtggattggggttgttgg

SEQ ID NO: 22001 - DNA, 23 bp, Homo sapiens
caaaacgtggattggggttgttg

SEQ ID NO: 22002 - DNA, 23 bp, Homo sapiens
ccaaaacgtggattggggttgtt

SEQ ID NO: 22003 - DNA, 23 bp, Homo sapiens
tccaaaacgtggattggggttgt

SEQ ID NO: 22004 - DNA, 23 bp, Homo sapiens
atccaaaacgtggattggggttg

SEQ ID NO: 22005 - DNA, 23 bp, Homo sapiens
catccaaaacgtggattggggtt

SEQ ID NO: 22006 - DNA, 23 bp, Homo sapiens
gcatccaaaacgtggattggggt

SEQ ID NO: 22007 - DNA, 23 bp, Homo sapiens
tgcatccaaaacgtggattgggg

SEQ ID NO: 22008 - DNA, 23 bp, Homo sapiens
gtgcatccaaaacgtggattggg

SEQ ID NO: 22009 - DNA, 23 bp, Homo sapiens
agtgcatccaaaacgtggattgg

SEQ ID NO: 22010 - DNA, 23 bp, Homo sapiens
cagtgcatccaaaacgtggattg

SEQ ID NO: 22011 - DNA, 23 bp, Homo sapiens
tcagtgcatccaaaacgtggatt

SEQ ID NO: 22012 - DNA, 23 bp, Homo sapiens
ctcagtgcatccaaaacgtggat

SEQ ID NO: 22013 - DNA, 23 bp, Homo sapiens
tctcagtgcatccaaaacgtgga

SEQ ID NO: 22014 - DNA, 23 bp, Homo sapiens
gtctcagtgcatccaaaacgtgg

SEQ ID NO: 22015 - DNA, 23 bp, Homo sapiens
ggtctcagtgcatccaaaacgtg

SEQ ID NO: 22016 - DNA, 23 bp, Homo sapiens
gggtctcagtgcatccaaaacgt

SEQ ID NO: 22017 - DNA, 23 bp, Homo sapiens
ggggtctcagtgcatccaaaacg

SEQ ID NO: 22018 - DNA, 23 bp, Homo sapiens
cggggtctcagtgcatccaaaac

SEQ ID NO: 22019 - DNA, 23 bp, Homo sapiens
tcggggtctcagtgcatccaaaa

SEQ ID NO: 22020 - DNA, 23 bp, Homo sapiens
gtcggggtctcagtgcatccaaa

SEQ ID NO: 22021 - DNA, 23 bp, Homo sapiens
tgtcggggtctcagtgcatccaa

SEQ ID NO: 22022 - DNA, 23 bp, Homo sapiens
atgtcggggtctcagtgcatcca

SEQ ID NO: 22023 - DNA, 23 bp, Homo sapiens
aatgtcggggtctcagtgcatcc

SEQ ID NO: 22024 - DNA, 23 bp, Homo sapiens
gaatgtcggggtctcagtgcatc

SEQ ID NO: 22025 - DNA, 23 bp, Homo sapiens
ggaatgtcggggtctcagtgcat

SEQ ID NO: 22026 - DNA, 23 bp, Homo sapiens
aggaatgtcggggtctcagtgca

SEQ ID NO: 22027 - DNA, 23 bp, Homo sapiens
gaggaatgtcggggtctcagtgc

SEQ ID NO: 22028 - DNA, 23 bp, Homo sapiens
cgaggaatgtcggggtctcagtg

SEQ ID NO: 22029 - DNA, 23 bp, Homo sapiens
ccgaggaatgtcggggtctcagt

SEQ ID NO: 22030 - DNA, 23 bp, Homo sapiens
accgaggaatgtcggggtctcag

SEQ ID NO: 22031 - DNA, 23 bp, Homo sapiens
taccgaggaatgtcggggtctca

SEQ ID NO: 22032 - DNA, 23 bp, Homo sapiens
ataccgaggaatgtcggggtctc

SEQ ID NO: 22033 - DNA, 23 bp, Homo sapiens
aataccgaggaatgtcggggtct

SEQ ID NO: 22034 - DNA, 23 bp, Homo sapiens
aaataccgaggaatgtcggggtc

SEQ ID NO: 22035 - DNA, 23 bp, Homo sapiens
taaataccgaggaatgtcggggt

SEQ ID NO: 22036 - DNA, 23 bp, Homo sapiens
ataaataccgaggaatgtcgggg

SEQ ID NO: 22037 - DNA, 23 bp, Homo sapiens
aataaataccgaggaatgtcggg

SEQ ID NO: 22038 - DNA, 23 bp, Homo sapiens
caataaataccgaggaatgtcgg

SEQ ID NO: 22039 - DNA, 23 bp, Homo sapiens
acaataaataccgaggaatgtcg

SEQ ID NO: 22040 - DNA, 23 bp, Homo sapiens
gacaataaataccgaggaatgtc

SEQ ID NO: 22041 - DNA, 23 bp, Homo sapiens
agacaataaataccgaggaatgt

SEQ ID NO: 22042 - DNA, 23 bp, Homo sapiens
cagacaataaataccgaggaatg

SEQ ID NO: 22043 - DNA, 23 bp, Homo sapiens
acagacaataaataccgaggaat

SEQ ID NO: 22044 - DNA, 23 bp, Homo sapiens
gacagacaataaataccgaggaa

SEQ ID NO: 22045 - DNA, 23 bp, Homo sapiens
ggacagacaataaataccgagga

SEQ ID NO: 22046 - DNA, 23 bp, Homo sapiens
gggacagacaataaataccgagg

SEQ ID NO: 22047 - DNA, 23 bp, Homo sapiens
ggggacagacaataaataccgag

SEQ ID NO: 22048 - DNA, 23 bp, Homo sapiens
tggggacagacaataaataccga

SEQ ID NO: 22049 - DNA, 23 bp, Homo sapiens
gtggggacagacaataaataccg

SEQ ID NO: 22050 - DNA, 23 bp, Homo sapiens
ggtggggacagacaataaatacc

SEQ ID NO: 22051 - DNA, 23 bp, Homo sapiens
aggtggggacagacaataaatac

SEQ ID NO: 22052 - DNA, 23 bp, Homo sapiens
taggtggggacagacaataaata

SEQ ID NO: 22053 - DNA, 23 bp, Homo sapiens
ctaggtggggacagacaataaat

SEQ ID NO: 22054 - DNA, 23 bp, Homo sapiens
cctaggtggggacagacaataaa

SEQ ID NO: 22055 - DNA, 23 bp, Homo sapiens
tcctaggtggggacagacaataa

SEQ ID NO: 22056 - DNA, 23 bp, Homo sapiens
gtcctaggtggggacagacaata

SEQ ID NO: 22057 - DNA, 23 bp, Homo sapiens
ggtcctaggtggggacagacaat

SEQ ID NO: 22058 - DNA, 23 bp, Homo sapiens
gggtcctaggtggggacagacaa

SEQ ID NO: 22059 - DNA, 23 bp, Homo sapiens
ggggtcctaggtggggacagaca

SEQ ID NO: 22060 - DNA, 23 bp, Homo sapiens
gggggtcctaggtggggacagac

SEQ ID NO: 22061 - DNA, 23 bp, Homo sapiens
tgggggtcctaggtggggacaga

SEQ ID NO: 22062 - DNA, 23 bp, Homo sapiens
gtgggggtcctaggtggggacag

SEQ ID NO: 22063 - DNA, 23 bp, Homo sapiens
ggtgggggtcctaggtggggaca

SEQ ID NO: 22064 - DNA, 23 bp, Homo sapiens
gggtgggggtcctaggtggggac

SEQ ID NO: 22065 - DNA, 23 bp, Homo sapiens
ggggtgggggtcctaggtgggga

SEQ ID NO: 22066 - DNA, 23 bp, Homo sapiens
gggggtgggggtcctaggtgggg

SEQ ID NO: 22067 - DNA, 23 bp, Homo sapiens
cgggggtgggggtcctaggtggg

SEQ ID NO: 22068 - DNA, 23 bp, Homo sapiens
tcgggggtgggggtcctaggtgg

SEQ ID NO: 22069 - DNA, 23 bp, Homo sapiens
gtcgggggtgggggtcctaggtg

SEQ ID NO: 22070 - DNA, 23 bp, Homo sapiens
ggtcgggggtgggggtcctaggt

SEQ ID NO: 22071 - DNA, 23 bp, Homo sapiens
gggtcgggggtgggggtcctagg

SEQ ID NO: 22072 - DNA, 23 bp, Homo sapiens
agggtcgggggtgggggtcctag

SEQ ID NO: 22073 - DNA, 23 bp, Homo sapiens
gagggtcgggggtgggggtccta

SEQ ID NO: 22074 - DNA, 23 bp, Homo sapiens
cgagggtcgggggtgggggtcct

SEQ ID NO: 22075 - DNA, 23 bp, Homo sapiens
gcgagggtcgggggtgggggtcc

SEQ ID NO: 22076 - DNA, 23 bp, Homo sapiens
cgcgagggtcgggggtgggggtc

SEQ ID NO: 22077 - DNA, 23 bp, Homo sapiens
tcgcgagggtcgggggtgggggt

SEQ ID NO: 22078 - DNA, 23 bp, Homo sapiens
ttcgcgagggtcgggggtggggg

SEQ ID NO: 22079 - DNA, 23 bp, Homo sapiens
attcgcgagggtcgggggtgggg

SEQ ID NO: 22080 - DNA, 23 bp, Homo sapiens
tattcgcgagggtcgggggtggg

SEQ ID NO: 22081 - DNA, 23 bp, Homo sapiens
ttattcgcgagggtcgggggtgg

SEQ ID NO: 22082 - DNA, 23 bp, Homo sapiens
tttattcgcgagggtcgggggtg

SEQ ID NO: 22083 - DNA, 23 bp, Homo sapiens
ttttattcgcgagggtcgggggt

SEQ ID NO: 22084 - DNA, 23 bp, Homo sapiens
cttttattcgcgagggtcggggg

SEQ ID NO: 22085 - DNA, 23 bp, Homo sapiens
ccttttattcgcgagggtcgggg

SEQ ID NO: 22086 - DNA, 23 bp, Homo sapiens
gccttttattcgcgagggtcggg

SEQ ID NO: 22087 - DNA, 23 bp, Homo sapiens
ggccttttattcgcgagggtcgg

SEQ ID NO: 22088 - DNA, 23 bp, Homo sapiens
gggccttttattcgcgagggtcg

SEQ ID NO: 22089 - DNA, 23 bp, Homo sapiens
agggccttttattcgcgagggtc

SEQ ID NO: 22090 - DNA, 23 bp, Homo sapiens
gagggccttttattcgcgagggt

SEQ ID NO: 22091 - DNA, 23 bp, Homo sapiens
ggagggccttttattcgcgaggg

SEQ ID NO: 22092 - DNA, 23 bp, Homo sapiens
tggagggccttttattcgcgagg

SEQ ID NO: 22093 - DNA, 23 bp, Homo sapiens
atggagggccttttattcgcgag

SEQ ID NO: 22094 - DNA, 23 bp, Homo sapiens
gatggagggccttttattcgcga

SEQ ID NO: 22095 - DNA, 23 bp, Homo sapiens
agatggagggccttttattcgcg

SEQ ID NO: 22096 - DNA, 23 bp, Homo sapiens
cagatggagggccttttattcgc

SEQ ID NO: 22097 - DNA, 23 bp, Homo sapiens
gcagatggagggccttttattcg

SEQ ID NO: 22098 - DNA, 23 bp, Homo sapiens
ggcagatggagggccttttattc

SEQ ID NO: 22099 - DNA, 23 bp, Homo sapiens
gggcagatggagggccttttatt

SEQ ID NO: 22100 - DNA, 23 bp, Homo sapiens
tgggcagatggagggccttttat

SEQ ID NO: 22101 - DNA, 23 bp, Homo sapiens
ttgggcagatggagggcctttta

SEQ ID NO: 22102 - DNA, 23 bp, Homo sapiens
tttgggcagatggagggcctttt

SEQ ID NO: 22103 - DNA, 23 bp, Homo sapiens
ctttgggcagatggagggccttt

SEQ ID NO: 22104 - DNA, 23 bp, Homo sapiens
gctttgggcagatggagggcctt

SEQ ID NO: 22105 - DNA, 23 bp, Homo sapiens
agctttgggcagatggagggcct

SEQ ID NO: 22106 - DNA, 23 bp, Homo sapiens
gagctttgggcagatggagggcc

SEQ ID NO: 22107 - DNA, 23 bp, Homo sapiens
agagctttgggcagatggagggc

SEQ ID NO: 22108 - DNA, 23 bp, Homo sapiens
cagagctttgggcagatggaggg

SEQ ID NO: 22109 - DNA, 23 bp, Homo sapiens
ccagagctttgggcagatggagg

SEQ ID NO: 22110 - DNA, 23 bp, Homo sapiens
tccagagctttgggcagatggag

SEQ ID NO: 22111 - DNA, 19 bp, Homo sapiens
tgtcccctgggcctctctg

SEQ ID NO: 22112 - DNA, 19 bp, Homo sapiens
ctgtcccctgggcctctct

SEQ ID NO: 22113 - DNA, 19 bp, Homo sapiens
gctgtcccctgggcctctc

SEQ ID NO: 22114 - DNA, 19 bp, Homo sapiens
ggctgtcccctgggcctct

SEQ ID NO: 22115 - DNA, 19 bp, Homo sapiens
tggctgtcccctgggcctc

SEQ ID NO: 22116 - DNA, 19 bp, Homo sapiens
ctggctgtcccctgggcct

SEQ ID NO: 22117 - DNA, 19 bp, Homo sapiens
cctggctgtcccctgggcc

SEQ ID NO: 22118 - DNA, 19 bp, Homo sapiens
ccctggctgtcccctgggc

SEQ ID NO: 22119 - DNA, 19 bp, Homo sapiens
tccctggctgtcccctggg

SEQ ID NO: 22120 - DNA, 19 bp, Homo sapiens
gtccctggctgtcccctgg

SEQ ID NO: 22121 - DNA, 19 bp, Homo sapiens
tgtccctggctgtcccctg

SEQ ID NO: 22122 - DNA, 19 bp, Homo sapiens
ctgtccctggctgtcccct

SEQ ID NO: 22123 - DNA, 19 bp, Homo sapiens
cctgtccctggctgtcccc

SEQ ID NO: 22124 - DNA, 19 bp, Homo sapiens
gcctgtccctggctgtccc

SEQ ID NO: 22125 - DNA, 19 bp, Homo sapiens
tgcctgtccctggctgtcc

SEQ ID NO: 22126 - DNA, 19 bp, Homo sapiens
ctgcctgtccctggctgtc

SEQ ID NO: 22127 - DNA, 19 bp, Homo sapiens
tctgcctgtccctggctgt

SEQ ID NO: 22128 - DNA, 19 bp, Homo sapiens
gtctgcctgtccctggctg

SEQ ID NO: 22129 - DNA, 19 bp, Homo sapiens
tgtctgcctgtccctggct

SEQ ID NO: 22130 - DNA, 19 bp, Homo sapiens
atgtctgcctgtccctggc

SEQ ID NO: 22131 - DNA, 19 bp, Homo sapiens
catgtctgcctgtccctgg

SEQ ID NO: 22132 - DNA, 19 bp, Homo sapiens
gcatgtctgcctgtccctg

SEQ ID NO: 22133 - DNA, 19 bp, Homo sapiens
tgcatgtctgcctgtccct

SEQ ID NO: 22134 - DNA, 19 bp, Homo sapiens
ctgcatgtctgcctgtccc

SEQ ID NO: 22135 - DNA, 19 bp, Homo sapiens
gctgcatgtctgcctgtcc

SEQ ID NO: 22136 - DNA, 19 bp, Homo sapiens
ggctgcatgtctgcctgtc

SEQ ID NO: 22137 - DNA, 19 bp, Homo sapiens
tggctgcatgtctgcctgt

SEQ ID NO: 22138 - DNA, 19 bp, Homo sapiens
ctggctgcatgtctgcctg

SEQ ID NO: 22139 - DNA, 19 bp, Homo sapiens
cctggctgcatgtctgcct

SEQ ID NO: 22140 - DNA, 19 bp, Homo sapiens
ccctggctgcatgtctgcc

SEQ ID NO: 22141 - DNA, 19 bp, Homo sapiens
gccctggctgcatgtctgc

SEQ ID NO: 22142 - DNA, 19 bp, Homo sapiens
agccctggctgcatgtctg

SEQ ID NO: 22143 - DNA, 19 bp, Homo sapiens
gagccctggctgcatgtct

SEQ ID NO: 22144 - DNA, 19 bp, Homo sapiens
ggagccctggctgcatgtc

SEQ ID NO: 22145 - DNA, 19 bp, Homo sapiens
tggagccctggctgcatgt

SEQ ID NO: 22146 - DNA, 19 bp, Homo sapiens
ctggagccctggctgcatg

SEQ ID NO: 22147 - DNA, 19 bp, Homo sapiens
cctggagccctggctgcat

SEQ ID NO: 22148 - DNA, 19 bp, Homo sapiens
ccctggagccctggctgca

SEQ ID NO: 22149 - DNA, 19 bp, Homo sapiens
gccctggagccctggctgc

SEQ ID NO: 22150 - DNA, 19 bp, Homo sapiens
ggccctggagccctggctg

SEQ ID NO: 22151 - DNA, 19 bp, Homo sapiens
aggccctggagccctggct

SEQ ID NO: 22152 - DNA, 19 bp, Homo sapiens
caggccctggagccctggc

SEQ ID NO: 22153 - DNA, 19 bp, Homo sapiens
ccaggccctggagccctgg

SEQ ID NO: 22154 - DNA, 19 bp, Homo sapiens
tccaggccctggagccctg

SEQ ID NO: 22155 - DNA, 19 bp, Homo sapiens
gtccaggccctggagccct

SEQ ID NO: 22156 - DNA, 19 bp, Homo sapiens
tgtccaggccctggagccc

SEQ ID NO: 22157 - DNA, 19 bp, Homo sapiens
ctgtccaggccctggagcc

SEQ ID NO: 22158 - DNA, 19 bp, Homo sapiens
cctgtccaggccctggagc

SEQ ID NO: 22159 - DNA, 19 bp, Homo sapiens
ccctgtccaggccctggag

SEQ ID NO: 22160 - DNA, 19 bp, Homo sapiens
cccctgtccaggccctgga

SEQ ID NO: 22161 - DNA, 19 bp, Homo sapiens
gcccctgtccaggccctgg

SEQ ID NO: 22162 - DNA, 19 bp, Homo sapiens
agcccctgtccaggccctg

SEQ ID NO: 22163 - DNA, 19 bp, Homo sapiens
cagcccctgtccaggccct

SEQ ID NO: 22164 - DNA, 19 bp, Homo sapiens
gcagcccctgtccaggccc

SEQ ID NO: 22165 - DNA, 19 bp, Homo sapiens
ggcagcccctgtccaggcc

SEQ ID NO: 22166 - DNA, 19 bp, Homo sapiens
tggcagcccctgtccaggc

SEQ ID NO: 22167 - DNA, 19 bp, Homo sapiens
ctggcagcccctgtccagg

SEQ ID NO: 22168 - DNA, 19 bp, Homo sapiens
cctggcagcccctgtccag

SEQ ID NO: 22169 - DNA, 19 bp, Homo sapiens
gcctggcagcccctgtcca

SEQ ID NO: 22170 - DNA, 19 bp, Homo sapiens
ggcctggcagcccctgtcc

SEQ ID NO: 22171 - DNA, 19 bp, Homo sapiens
gggcctggcagcccctgtc

SEQ ID NO: 22172 - DNA, 19 bp, Homo sapiens
agggcctggcagcccctgt

SEQ ID NO: 22173 - DNA, 19 bp, Homo sapiens
cagggcctggcagcccctg

SEQ ID NO: 22174 - DNA, 19 bp, Homo sapiens
acagggcctggcagcccct

SEQ ID NO: 22175 - DNA, 19 bp, Homo sapiens
cacagggcctggcagcccc

SEQ ID NO: 22176 - DNA, 19 bp, Homo sapiens
tcacagggcctggcagccc

SEQ ID NO: 22177 - DNA, 19 bp, Homo sapiens
gtcacagggcctggcagcc

SEQ ID NO: 22178 - DNA, 19 bp, Homo sapiens
tgtcacagggcctggcagc

SEQ ID NO: 22179 - DNA, 19 bp, Homo sapiens
ctgtcacagggcctggcag

SEQ ID NO: 22180 - DNA, 19 bp, Homo sapiens
cctgtcacagggcctggca

SEQ ID NO: 22181 - DNA, 19 bp, Homo sapiens
tcctgtcacagggcctggc

SEQ ID NO: 22182 - DNA, 19 bp, Homo sapiens
ctcctgtcacagggcctgg

SEQ ID NO: 22183 - DNA, 19 bp, Homo sapiens
cctcctgtcacagggcctg

SEQ ID NO: 22184 - DNA, 19 bp, Homo sapiens
tcctcctgtcacagggcct

SEQ ID NO: 22185 - DNA, 19 bp, Homo sapiens
gtcctcctgtcacagggcc

SEQ ID NO: 22186 - DNA, 19 bp, Homo sapiens
ggtcctcctgtcacagggc

SEQ ID NO: 22187 - DNA, 19 bp, Homo sapiens
gggtcctcctgtcacaggg

SEQ ID NO: 22188 - DNA, 19 bp, Homo sapiens
ggggtcctcctgtcacagg

SEQ ID NO: 22189 - DNA, 19 bp, Homo sapiens
cggggtcctcctgtcacag

SEQ ID NO: 22190 - DNA, 19 bp, Homo sapiens
tcggggtcctcctgtcaca

SEQ ID NO: 22191 - DNA, 19 bp, Homo sapiens
ctcggggtcctcctgtcac

SEQ ID NO: 22192 - DNA, 19 bp, Homo sapiens
gctcggggtcctcctgtca

SEQ ID NO: 22193 - DNA, 19 bp, Homo sapiens
ggctcggggtcctcctgtc

SEQ ID NO: 22194 - DNA, 19 bp, Homo sapiens
gggctcggggtcctcctgt

SEQ ID NO: 22195 - DNA, 19 bp, Homo sapiens
ggggctcggggtcctcctg

SEQ ID NO: 22196 - DNA, 19 bp, Homo sapiens
gggggctcggggtcctcct

SEQ ID NO: 22197 - DNA, 19 bp, Homo sapiens
cgggggctcggggtcctcc

SEQ ID NO: 22198 - DNA, 19 bp, Homo sapiens
ccgggggctcggggtcctc

SEQ ID NO: 22199 - DNA, 19 bp, Homo sapiens
gccgggggctcggggtcct

SEQ ID NO: 22200 - DNA, 19 bp, Homo sapiens
ggccgggggctcggggtcc

SEQ ID NO: 22201 - DNA, 19 bp, Homo sapiens
gggccgggggctcggggtc

SEQ ID NO: 22202 - DNA, 19 bp, Homo sapiens
cgggccgggggctcggggt

SEQ ID NO: 22203 - DNA, 19 bp, Homo sapiens
ccgggccgggggctcgggg

SEQ ID NO: 22204 - DNA, 19 bp, Homo sapiens
cccgggccgggggctcggg

SEQ ID NO: 22205 - DNA, 19 bp, Homo sapiens
ccccgggccgggggctcgg

SEQ ID NO: 22206 - DNA, 19 bp, Homo sapiens
tccccgggccgggggctcg

SEQ ID NO: 22207 - DNA, 19 bp, Homo sapiens
ctccccgggccgggggctc

SEQ ID NO: 22208 - DNA, 19 bp, Homo sapiens
cctccccgggccgggggct

SEQ ID NO: 22209 - DNA, 19 bp, Homo sapiens
ccctccccgggccgggggc

SEQ ID NO: 22210 - DNA, 19 bp, Homo sapiens
cccctccccgggccggggg

SEQ ID NO: 22211 - DNA, 19 bp, Homo sapiens
gcccctccccgggccgggg

SEQ ID NO: 22212 - DNA, 19 bp, Homo sapiens
ggcccctccccgggccggg

SEQ ID NO: 22213 - DNA, 19 bp, Homo sapiens
tggcccctccccgggccgg

SEQ ID NO: 22214 - DNA, 19 bp, Homo sapiens
atggcccctccccgggccg

SEQ ID NO: 22215 - DNA, 19 bp, Homo sapiens
catggcccctccccgggcc

SEQ ID NO: 22216 - DNA, 19 bp, Homo sapiens
ccatggcccctccccgggc

SEQ ID NO: 22217 - DNA, 19 bp, Homo sapiens
accatggcccctccccggg

SEQ ID NO: 22218 - DNA, 19 bp, Homo sapiens
caccatggcccctccccgg

SEQ ID NO: 22219 - DNA, 19 bp, Homo sapiens
gcaccatggcccctccccg

SEQ ID NO: 22220 - DNA, 19 bp, Homo sapiens
agcaccatggcccctcccc

SEQ ID NO: 22221 - DNA, 19 bp, Homo sapiens
cagcaccatggcccctccc

SEQ ID NO: 22222 - DNA, 19 bp, Homo sapiens
gcagcaccatggcccctcc

SEQ ID NO: 22223 - DNA, 19 bp, Homo sapiens
ggcagcaccatggcccctc

SEQ ID NO: 22224 - DNA, 19 bp, Homo sapiens
aggcagcaccatggcccct

SEQ ID NO: 22225 - DNA, 19 bp, Homo sapiens
caggcagcaccatggcccc

SEQ ID NO: 22226 - DNA, 19 bp, Homo sapiens
acaggcagcaccatggccc

SEQ ID NO: 22227 - DNA, 19 bp, Homo sapiens
gacaggcagcaccatggcc

SEQ ID NO: 22228 - DNA, 19 bp, Homo sapiens
ggacaggcagcaccatggc

SEQ ID NO: 22229 - DNA, 19 bp, Homo sapiens
tggacaggcagcaccatgg

SEQ ID NO: 22230 - DNA, 19 bp, Homo sapiens
ttggacaggcagcaccatg

SEQ ID NO: 22231 - DNA, 19 bp, Homo sapiens
gttggacaggcagcaccat

SEQ ID NO: 22232 - DNA, 19 bp, Homo sapiens
tgttggacaggcagcacca

SEQ ID NO: 22233 - DNA, 19 bp, Homo sapiens
atgttggacaggcagcacc

SEQ ID NO: 22234 - DNA, 19 bp, Homo sapiens
catgttggacaggcagcac

SEQ ID NO: 22235 - DNA, 19 bp, Homo sapiens
acatgttggacaggcagca

SEQ ID NO: 22236 - DNA, 19 bp, Homo sapiens
gacatgttggacaggcagc

SEQ ID NO: 22237 - DNA, 19 bp, Homo sapiens
tgacatgttggacaggcag

SEQ ID NO: 22238 - DNA, 19 bp, Homo sapiens
ctgacatgttggacaggca

SEQ ID NO: 22239 - DNA, 19 bp, Homo sapiens
gctgacatgttggacaggc

SEQ ID NO: 22240 - DNA, 19 bp, Homo sapiens
ggctgacatgttggacagg

SEQ ID NO: 22241 - DNA, 19 bp, Homo sapiens
cggctgacatgttggacag

SEQ ID NO: 22242 - DNA, 19 bp, Homo sapiens
tcggctgacatgttggaca

SEQ ID NO: 22243 - DNA, 19 bp, Homo sapiens
ctcggctgacatgttggac

SEQ ID NO: 22244 - DNA, 19 bp, Homo sapiens
cctcggctgacatgttgga

SEQ ID NO: 22245 - DNA, 19 bp, Homo sapiens
acctcggctgacatgttgg

SEQ ID NO: 22246 - DNA, 19 bp, Homo sapiens
cacctcggctgacatgttg

SEQ ID NO: 22247 - DNA, 19 bp, Homo sapiens
gcacctcggctgacatgtt

SEQ ID NO: 22248 - DNA, 19 bp, Homo sapiens
cgcacctcggctgacatgt

SEQ ID NO: 22249 - DNA, 19 bp, Homo sapiens
ccgcacctcggctgacatg

SEQ ID NO: 22250 - DNA, 19 bp, Homo sapiens
gccgcacctcggctgacat

SEQ ID NO: 22251 - DNA, 19 bp, Homo sapiens
agccgcacctcggctgaca

SEQ ID NO: 22252 - DNA, 19 bp, Homo sapiens
cagccgcacctcggctgac

SEQ ID NO: 22253 - DNA, 19 bp, Homo sapiens
tcagccgcacctcggctga

SEQ ID NO: 22254 - DNA, 19 bp, Homo sapiens
ctcagccgcacctcggctg

SEQ ID NO: 22255 - DNA, 19 bp, Homo sapiens
cctcagccgcacctcggct

SEQ ID NO: 22256 - DNA, 19 bp, Homo sapiens
gcctcagccgcacctcggc

SEQ ID NO: 22257 - DNA, 19 bp, Homo sapiens
cgcctcagccgcacctcgg

SEQ ID NO: 22258 - DNA, 19 bp, Homo sapiens
ccgcctcagccgcacctcg

SEQ ID NO: 22259 - DNA, 19 bp, Homo sapiens
gccgcctcagccgcacctc

SEQ ID NO: 22260 - DNA, 19 bp, Homo sapiens
agccgcctcagccgcacct

SEQ ID NO: 22261 - DNA, 19 bp, Homo sapiens
gagccgcctcagccgcacc

SEQ ID NO: 22262 - DNA, 19 bp, Homo sapiens
ggagccgcctcagccgcac

SEQ ID NO: 22263 - DNA, 19 bp, Homo sapiens
tggagccgcctcagccgca

SEQ ID NO: 22264 - DNA, 19 bp, Homo sapiens
ctggagccgcctcagccgc

SEQ ID NO: 22265 - DNA, 19 bp, Homo sapiens
gctggagccgcctcagccg

SEQ ID NO: 22266 - DNA, 19 bp, Homo sapiens
tgctggagccgcctcagcc

SEQ ID NO: 22267 - DNA, 19 bp, Homo sapiens
ctgctggagccgcctcagc

SEQ ID NO: 22268 - DNA, 19 bp, Homo sapiens
gctgctggagccgcctcag

SEQ ID NO: 22269 - DNA, 19 bp, Homo sapiens
agctgctggagccgcctca

SEQ ID NO: 22270 - DNA, 19 bp, Homo sapiens
cagctgctggagccgcctc

SEQ ID NO: 22271 - DNA, 19 bp, Homo sapiens
ccagctgctggagccgcct

SEQ ID NO: 22272 - DNA, 19 bp, Homo sapiens
accagctgctggagccgcc

SEQ ID NO: 22273 - DNA, 19 bp, Homo sapiens
caccagctgctggagccgc

SEQ ID NO: 22274 - DNA, 19 bp, Homo sapiens
acaccagctgctggagccg

SEQ ID NO: 22275 - DNA, 19 bp, Homo sapiens
aacaccagctgctggagcc

SEQ ID NO: 22276 - DNA, 19 bp, Homo sapiens
caacaccagctgctggagc

SEQ ID NO: 22277 - DNA, 19 bp, Homo sapiens
ccaacaccagctgctggag

SEQ ID NO: 22278 - DNA, 19 bp, Homo sapiens
tccaacaccagctgctgga

SEQ ID NO: 22279 - DNA, 19 bp, Homo sapiens
gtccaacaccagctgctgg

SEQ ID NO: 22280 - DNA, 19 bp, Homo sapiens
ggtccaacaccagctgctg

SEQ ID NO: 22281 - DNA, 19 bp, Homo sapiens
gggtccaacaccagctgct

SEQ ID NO: 22282 - DNA, 19 bp, Homo sapiens
cgggtccaacaccagctgc

SEQ ID NO: 22283 - DNA, 19 bp, Homo sapiens
ccgggtccaacaccagctg

SEQ ID NO: 22284 - DNA, 19 bp, Homo sapiens
cccgggtccaacaccagct

SEQ ID NO: 22285 - DNA, 19 bp, Homo sapiens
gcccgggtccaacaccagc

SEQ ID NO: 22286 - DNA, 19 bp, Homo sapiens
agcccgggtccaacaccag

SEQ ID NO: 22287 - DNA, 19 bp, Homo sapiens
aagcccgggtccaacacca

SEQ ID NO: 22288 - DNA, 19 bp, Homo sapiens
gaagcccgggtccaacacc

SEQ ID NO: 22289 - DNA, 19 bp, Homo sapiens
ggaagcccgggtccaacac

SEQ ID NO: 22290 - DNA, 19 bp, Homo sapiens
aggaagcccgggtccaaca

SEQ ID NO: 22291 - DNA, 19 bp, Homo sapiens
caggaagcccgggtccaac

SEQ ID NO: 22292 - DNA, 19 bp, Homo sapiens
ccaggaagcccgggtccaa

SEQ ID NO: 22293 - DNA, 19 bp, Homo sapiens
cccaggaagcccgggtcca

SEQ ID NO: 22294 - DNA, 19 bp, Homo sapiens
ccccaggaagcccgggtcc

SEQ ID NO: 22295 - DNA, 19 bp, Homo sapiens
gccccaggaagcccgggtc

SEQ ID NO: 22296 - DNA, 19 bp, Homo sapiens
agccccaggaagcccgggt

SEQ ID NO: 22297 - DNA, 19 bp, Homo sapiens
cagccccaggaagcccggg

SEQ ID NO: 22298 - DNA, 19 bp, Homo sapiens
ccagccccaggaagcccgg

SEQ ID NO: 22299 - DNA, 19 bp, Homo sapiens
tccagccccaggaagcccg

SEQ ID NO: 22300 - DNA, 19 bp, Homo sapiens
ctccagccccaggaagccc

SEQ ID NO: 22301 - DNA, 19 bp, Homo sapiens
gctccagccccaggaagcc

SEQ ID NO: 22302 - DNA, 19 bp, Homo sapiens
ggctccagccccaggaagc

SEQ ID NO: 22303 - DNA, 19 bp, Homo sapiens
gggctccagccccaggaag

SEQ ID NO: 22304 - DNA, 19 bp, Homo sapiens
ggggctccagccccaggaa

SEQ ID NO: 22305 - DNA, 19 bp, Homo sapiens
aggggctccagccccagga

SEQ ID NO: 22306 - DNA, 19 bp, Homo sapiens
caggggctccagccccagg

SEQ ID NO: 22307 - DNA, 19 bp, Homo sapiens
gcaggggctccagccccag

SEQ ID NO: 22308 - DNA, 19 bp, Homo sapiens
agcaggggctccagcccca

SEQ ID NO: 22309 - DNA, 19 bp, Homo sapiens
gagcaggggctccagcccc

SEQ ID NO: 22310 - DNA, 19 bp, Homo sapiens
cgagcaggggctccagccc

SEQ ID NO: 22311 - DNA, 19 bp, Homo sapiens
tcgagcaggggctccagcc

SEQ ID NO: 22312 - DNA, 19 bp, Homo sapiens
gtcgagcaggggctccagc

SEQ ID NO: 22313 - DNA, 19 bp, Homo sapiens
ggtcgagcaggggctccag

SEQ ID NO: 22314 - DNA, 19 bp, Homo sapiens
aggtcgagcaggggctcca

SEQ ID NO: 22315 - DNA, 19 bp, Homo sapiens
aaggtcgagcaggggctcc

SEQ ID NO: 22316 - DNA, 19 bp, Homo sapiens
gaaggtcgagcaggggctc

SEQ ID NO: 22317 - DNA, 19 bp, Homo sapiens
agaaggtcgagcaggggct

SEQ ID NO: 22318 - DNA, 19 bp, Homo sapiens
gagaaggtcgagcaggggc

SEQ ID NO: 22319 - DNA, 19 bp, Homo sapiens
ggagaaggtcgagcagggg

SEQ ID NO: 22320 - DNA, 19 bp, Homo sapiens
aggagaaggtcgagcaggg

SEQ ID NO: 22321 - DNA, 19 bp, Homo sapiens
caggagaaggtcgagcagg

SEQ ID NO: 22322 - DNA, 19 bp, Homo sapiens
ccaggagaaggtcgagcag

SEQ ID NO: 22323 - DNA, 19 bp, Homo sapiens
cccaggagaaggtcgagca

SEQ ID NO: 22324 - DNA, 19 bp, Homo sapiens
gcccaggagaaggtcgagc

SEQ ID NO: 22325 - DNA, 19 bp, Homo sapiens
cgcccaggagaaggtcgag

SEQ ID NO: 22326 - DNA, 19 bp, Homo sapiens
acgcccaggagaaggtcga

SEQ ID NO: 22327 - DNA, 19 bp, Homo sapiens
gacgcccaggagaaggtcg

SEQ ID NO: 22328 - DNA, 19 bp, Homo sapiens
ggacgcccaggagaaggtc

SEQ ID NO: 22329 - DNA, 19 bp, Homo sapiens
tggacgcccaggagaaggt

SEQ ID NO: 22330 - DNA, 19 bp, Homo sapiens
gtggacgcccaggagaagg

SEQ ID NO: 22331 - DNA, 19 bp, Homo sapiens
ggtggacgcccaggagaag

SEQ ID NO: 22332 - DNA, 19 bp, Homo sapiens
tggtggacgcccaggagaa

SEQ ID NO: 22333 - DNA, 19 bp, Homo sapiens
ctggtggacgcccaggaga

SEQ ID NO: 22334 - DNA, 19 bp, Homo sapiens
cctggtggacgcccaggag

SEQ ID NO: 22335 - DNA, 19 bp, Homo sapiens
tcctggtggacgcccagga

SEQ ID NO: 22336 - DNA, 19 bp, Homo sapiens
ctcctggtggacgcccagg

SEQ ID NO: 22337 - DNA, 19 bp, Homo sapiens
gctcctggtggacgcccag

SEQ ID NO: 22338 - DNA, 19 bp, Homo sapiens
agctcctggtggacgccca

SEQ ID NO: 22339 - DNA, 19 bp, Homo sapiens
cagctcctggtggacgccc

SEQ ID NO: 22340 - DNA, 19 bp, Homo sapiens
ccagctcctggtggacgcc

SEQ ID NO: 22341 - DNA, 19 bp, Homo sapiens
cccagctcctggtggacgc

SEQ ID NO: 22342 - DNA, 19 bp, Homo sapiens
gcccagctcctggtggacg

SEQ ID NO: 22343 - DNA, 19 bp, Homo sapiens
cgcccagctcctggtggac

SEQ ID NO: 22344 - DNA, 19 bp, Homo sapiens
gcgcccagctcctggtgga

SEQ ID NO: 22345 - DNA, 19 bp, Homo sapiens
ggcgcccagctcctggtgg

SEQ ID NO: 22346 - DNA, 19 bp, Homo sapiens
aggcgcccagctcctggtg

SEQ ID NO: 22347 - DNA, 19 bp, Homo sapiens
gaggcgcccagctcctggt

SEQ ID NO: 22348 - DNA, 19 bp, Homo sapiens
ggaggcgcccagctcctgg

SEQ ID NO: 22349 - DNA, 19 bp, Homo sapiens
cggaggcgcccagctcctg

SEQ ID NO: 22350 - DNA, 19 bp, Homo sapiens
tcggaggcgcccagctcct

SEQ ID NO: 22351 - DNA, 19 bp, Homo sapiens
ttcggaggcgcccagctcc

SEQ ID NO: 22352 - DNA, 19 bp, Homo sapiens
gttcggaggcgcccagctc

SEQ ID NO: 22353 - DNA, 19 bp, Homo sapiens
agttcggaggcgcccagct

SEQ ID NO: 22354 - DNA, 19 bp, Homo sapiens
cagttcggaggcgcccagc

SEQ ID NO: 22355 - DNA, 19 bp, Homo sapiens
ccagttcggaggcgcccag

SEQ ID NO: 22356 - DNA, 19 bp, Homo sapiens
gccagttcggaggcgccca

SEQ ID NO: 22357 - DNA, 19 bp, Homo sapiens
ggccagttcggaggcgccc

SEQ ID NO: 22358 - DNA, 19 bp, Homo sapiens
gggccagttcggaggcgcc

SEQ ID NO: 22359 - DNA, 19 bp, Homo sapiens
tgggccagttcggaggcgc

SEQ ID NO: 22360 - DNA, 19 bp, Homo sapiens
ctgggccagttcggaggcg

SEQ ID NO: 22361 - DNA, 19 bp, Homo sapiens
cctgggccagttcggaggc

SEQ ID NO: 22362 - DNA, 19 bp, Homo sapiens
tcctgggccagttcggagg

SEQ ID NO: 22363 - DNA, 19 bp, Homo sapiens
gtcctgggccagttcggag

SEQ ID NO: 22364 - DNA, 19 bp, Homo sapiens
tgtcctgggccagttcgga

SEQ ID NO: 22365 - DNA, 19 bp, Homo sapiens
ttgtcctgggccagttcgg

SEQ ID NO: 22366 - DNA, 19 bp, Homo sapiens
cttgtcctgggccagttcg

SEQ ID NO: 22367 - DNA, 19 bp, Homo sapiens
acttgtcctgggccagttc

SEQ ID NO: 22368 - DNA, 19 bp, Homo sapiens
tacttgtcctgggccagtt

SEQ ID NO: 22369 - DNA, 19 bp, Homo sapiens
gtacttgtcctgggccagt

SEQ ID NO: 22370 - DNA, 19 bp, Homo sapiens
cgtacttgtcctgggccag

SEQ ID NO: 22371 - DNA, 19 bp, Homo sapiens
acgtacttgtcctgggcca

SEQ ID NO: 22372 - DNA, 19 bp, Homo sapiens
cacgtacttgtcctgggcc

SEQ ID NO: 22373 - DNA, 19 bp, Homo sapiens
ccacgtacttgtcctgggc

SEQ ID NO: 22374 - DNA, 19 bp, Homo sapiens
gccacgtacttgtcctggg

SEQ ID NO: 22375 - DNA, 19 bp, Homo sapiens
ggccacgtacttgtcctgg

SEQ ID NO: 22376 - DNA, 19 bp, Homo sapiens
cggccacgtacttgtcctg

SEQ ID NO: 22377 - DNA, 19 bp, Homo sapiens
tcggccacgtacttgtcct

SEQ ID NO: 22378 - DNA, 19 bp, Homo sapiens
gtcggccacgtacttgtcc

SEQ ID NO: 22379 - DNA, 19 bp, Homo sapiens
agtcggccacgtacttgtc

SEQ ID NO: 22380 - DNA, 19 bp, Homo sapiens
aagtcggccacgtacttgt

SEQ ID NO: 22381 - DNA, 19 bp, Homo sapiens
gaagtcggccacgtacttg

SEQ ID NO: 22382 - DNA, 19 bp, Homo sapiens
agaagtcggccacgtactt

SEQ ID NO: 22383 - DNA, 19 bp, Homo sapiens
aagaagtcggccacgtact

SEQ ID NO: 22384 - DNA, 19 bp, Homo sapiens
caagaagtcggccacgtac

SEQ ID NO: 22385 - DNA, 19 bp, Homo sapiens
gcaagaagtcggccacgta

SEQ ID NO: 22386 - DNA, 19 bp, Homo sapiens
tgcaagaagtcggccacgt

SEQ ID NO: 22387 - DNA, 19 bp, Homo sapiens
ctgcaagaagtcggccacg

SEQ ID NO: 22388 - DNA, 19 bp, Homo sapiens
actgcaagaagtcggccac

SEQ ID NO: 22389 - DNA, 19 bp, Homo sapiens
cactgcaagaagtcggcca

SEQ ID NO: 22390 - DNA, 19 bp, Homo sapiens
ccactgcaagaagtcggcc

SEQ ID NO: 22391 - DNA, 19 bp, Homo sapiens
cccactgcaagaagtcggc

SEQ ID NO: 22392 - DNA, 19 bp, Homo sapiens
gcccactgcaagaagtcgg

SEQ ID NO: 22393 - DNA, 19 bp, Homo sapiens
cgcccactgcaagaagtcg

SEQ ID NO: 22394 - DNA, 19 bp, Homo sapiens
ccgcccactgcaagaagtc

SEQ ID NO: 22395 - DNA, 19 bp, Homo sapiens
tccgcccactgcaagaagt

SEQ ID NO: 22396 - DNA, 19 bp, Homo sapiens
ctccgcccactgcaagaag

SEQ ID NO: 22397 - DNA, 19 bp, Homo sapiens
gctccgcccactgcaagaa

SEQ ID NO: 22398 - DNA, 19 bp, Homo sapiens
ggctccgcccactgcaaga

SEQ ID NO: 22399 - DNA, 19 bp, Homo sapiens
gggctccgcccactgcaag

SEQ ID NO: 22400 - DNA, 19 bp, Homo sapiens
tgggctccgcccactgcaa

SEQ ID NO: 22401 - DNA, 19 bp, Homo sapiens
atgggctccgcccactgca

SEQ ID NO: 22402 - DNA, 19 bp, Homo sapiens
gatgggctccgcccactgc

SEQ ID NO: 22403 - DNA, 19 bp, Homo sapiens
cgatgggctccgcccactg

SEQ ID NO: 22404 - DNA, 19 bp, Homo sapiens
acgatgggctccgcccact

SEQ ID NO: 22405 - DNA, 19 bp, Homo sapiens
cacgatgggctccgcccac

SEQ ID NO: 22406 - DNA, 19 bp, Homo sapiens
ccacgatgggctccgccca

SEQ ID NO: 22407 - DNA, 19 bp, Homo sapiens
accacgatgggctccgccc

SEQ ID NO: 22408 - DNA, 19 bp, Homo sapiens
caccacgatgggctccgcc

SEQ ID NO: 22409 - DNA, 19 bp, Homo sapiens
tcaccacgatgggctccgc

SEQ ID NO: 22410 - DNA, 19 bp, Homo sapiens
ctcaccacgatgggctccg

SEQ ID NO: 22411 - DNA, 19 bp, Homo sapiens
cctcaccacgatgggctcc

SEQ ID NO: 22412 - DNA, 19 bp, Homo sapiens
gcctcaccacgatgggctc

SEQ ID NO: 22413 - DNA, 19 bp, Homo sapiens
agcctcaccacgatgggct

SEQ ID NO: 22414 - DNA, 19 bp, Homo sapiens
aagcctcaccacgatgggc

SEQ ID NO: 22415 - DNA, 19 bp, Homo sapiens
taagcctcaccacgatggg

SEQ ID NO: 22416 - DNA, 19 bp, Homo sapiens
ttaagcctcaccacgatgg

SEQ ID NO: 22417 - DNA, 19 bp, Homo sapiens
cttaagcctcaccacgatg

SEQ ID NO: 22418 - DNA, 19 bp, Homo sapiens
ccttaagcctcaccacgat

SEQ ID NO: 22419 - DNA, 19 bp, Homo sapiens
tccttaagcctcaccacga

SEQ ID NO: 22420 - DNA, 19 bp, Homo sapiens
ctccttaagcctcaccacg

SEQ ID NO: 22421 - DNA, 19 bp, Homo sapiens
cctccttaagcctcaccac

SEQ ID NO: 22422 - DNA, 19 bp, Homo sapiens
acctccttaagcctcacca

SEQ ID NO: 22423 - DNA, 19 bp, Homo sapiens
gacctccttaagcctcacc

SEQ ID NO: 22424 - DNA, 19 bp, Homo sapiens
ggacctccttaagcctcac

SEQ ID NO: 22425 - DNA, 19 bp, Homo sapiens
cggacctccttaagcctca

SEQ ID NO: 22426 - DNA, 19 bp, Homo sapiens
tcggacctccttaagcctc

SEQ ID NO: 22427 - DNA, 19 bp, Homo sapiens
gtcggacctccttaagcct

SEQ ID NO: 22428 - DNA, 19 bp, Homo sapiens
agtcggacctccttaagcc

SEQ ID NO: 22429 - DNA, 19 bp, Homo sapiens
cagtcggacctccttaagc

SEQ ID NO: 22430 - DNA, 19 bp, Homo sapiens
gcagtcggacctccttaag

SEQ ID NO: 22431 - DNA, 19 bp, Homo sapiens
tgcagtcggacctccttaa

SEQ ID NO: 22432 - DNA, 19 bp, Homo sapiens
ctgcagtcggacctcctta

SEQ ID NO: 22433 - DNA, 19 bp, Homo sapiens
tctgcagtcggacctcctt

SEQ ID NO: 22434 - DNA, 19 bp, Homo sapiens
ctctgcagtcggacctcct

SEQ ID NO: 22435 - DNA, 19 bp, Homo sapiens
cctctgcagtcggacctcc

SEQ ID NO: 22436 - DNA, 19 bp, Homo sapiens
ccctctgcagtcggacctc

SEQ ID NO: 22437 - DNA, 19 bp, Homo sapiens
tccctctgcagtcggacct

SEQ ID NO: 22438 - DNA, 19 bp, Homo sapiens
gtccctctgcagtcggacc

SEQ ID NO: 22439 - DNA, 19 bp, Homo sapiens
cgtccctctgcagtcggac

SEQ ID NO: 22440 - DNA, 19 bp, Homo sapiens
tcgtccctctgcagtcgga

SEQ ID NO: 22441 - DNA, 19 bp, Homo sapiens
gtcgtccctctgcagtcgg

SEQ ID NO: 22442 - DNA, 19 bp, Homo sapiens
agtcgtccctctgcagtcg

SEQ ID NO: 22443 - DNA, 19 bp, Homo sapiens
aagtcgtccctctgcagtc

SEQ ID NO: 22444 - DNA, 19 bp, Homo sapiens
gaagtcgtccctctgcagt

SEQ ID NO: 22445 - DNA, 19 bp, Homo sapiens
cgaagtcgtccctctgcag

SEQ ID NO: 22446 - DNA, 19 bp, Homo sapiens
tcgaagtcgtccctctgca

SEQ ID NO: 22447 - DNA, 19 bp, Homo sapiens
ctcgaagtcgtccctctgc

SEQ ID NO: 22448 - DNA, 19 bp, Homo sapiens
tctcgaagtcgtccctctg

SEQ ID NO: 22449 - DNA, 19 bp, Homo sapiens
atctcgaagtcgtccctct

SEQ ID NO: 22450 - DNA, 19 bp, Homo sapiens
aatctcgaagtcgtccctc

SEQ ID NO: 22451 - DNA, 19 bp, Homo sapiens
gaatctcgaagtcgtccct

SEQ ID NO: 22452 - DNA, 19 bp, Homo sapiens
agaatctcgaagtcgtccc

SEQ ID NO: 22453 - DNA, 19 bp, Homo sapiens
cagaatctcgaagtcgtcc

SEQ ID NO: 22454 - DNA, 19 bp, Homo sapiens
tcagaatctcgaagtcgtc

SEQ ID NO: 22455 - DNA, 19 bp, Homo sapiens
ttcagaatctcgaagtcgt

SEQ ID NO: 22456 - DNA, 19 bp, Homo sapiens
cttcagaatctcgaagtcg

SEQ ID NO: 22457 - DNA, 19 bp, Homo sapiens
ccttcagaatctcgaagtc

SEQ ID NO: 22458 - DNA, 19 bp, Homo sapiens
accttcagaatctcgaagt

SEQ ID NO: 22459 - DNA, 19 bp, Homo sapiens
caccttcagaatctcgaag

SEQ ID NO: 22460 - DNA, 19 bp, Homo sapiens
tcaccttcagaatctcgaa

SEQ ID NO: 22461 - DNA, 19 bp, Homo sapiens
atcaccttcagaatctcga

SEQ ID NO: 22462 - DNA, 19 bp, Homo sapiens
gatcaccttcagaatctcg

SEQ ID NO: 22463 - DNA, 19 bp, Homo sapiens
cgatcaccttcagaatctc

SEQ ID NO: 22464 - DNA, 19 bp, Homo sapiens
ccgatcaccttcagaatct

SEQ ID NO: 22465 - DNA, 19 bp, Homo sapiens
tccgatcaccttcagaatc

SEQ ID NO: 22466 - DNA, 19 bp, Homo sapiens
gtccgatcaccttcagaat

SEQ ID NO: 22467 - DNA, 19 bp, Homo sapiens
cgtccgatcaccttcagaa

SEQ ID NO: 22468 - DNA, 19 bp, Homo sapiens
gcgtccgatcaccttcaga

SEQ ID NO: 22469 - DNA, 19 bp, Homo sapiens
cgcgtccgatcaccttcag

SEQ ID NO: 22470 - DNA, 19 bp, Homo sapiens
ccgcgtccgatcaccttca

SEQ ID NO: 22471 - DNA, 19 bp, Homo sapiens
cccgcgtccgatcaccttc

SEQ ID NO: 22472 - DNA, 19 bp, Homo sapiens
ccccgcgtccgatcacctt

SEQ ID NO: 22473 - DNA, 19 bp, Homo sapiens
gccccgcgtccgatcacct

SEQ ID NO: 22474 - DNA, 19 bp, Homo sapiens
cgccccgcgtccgatcacc

SEQ ID NO: 22475 - DNA, 19 bp, Homo sapiens
acgccccgcgtccgatcac

SEQ ID NO: 22476 - DNA, 19 bp, Homo sapiens
aacgccccgcgtccgatca

SEQ ID NO: 22477 - DNA, 19 bp, Homo sapiens
gaacgccccgcgtccgatc

SEQ ID NO: 22478 - DNA, 19 bp, Homo sapiens
tgaacgccccgcgtccgat

SEQ ID NO: 22479 - DNA, 19 bp, Homo sapiens
ctgaacgccccgcgtccga

SEQ ID NO: 22480 - DNA, 19 bp, Homo sapiens
gctgaacgccccgcgtccg

SEQ ID NO: 22481 - DNA, 19 bp, Homo sapiens
cgctgaacgccccgcgtcc

SEQ ID NO: 22482 - DNA, 19 bp, Homo sapiens
tcgctgaacgccccgcgtc

SEQ ID NO: 22483 - DNA, 19 bp, Homo sapiens
ctcgctgaacgccccgcgt

SEQ ID NO: 22484 - DNA, 19 bp, Homo sapiens
cctcgctgaacgccccgcg

SEQ ID NO: 22485 - DNA, 19 bp, Homo sapiens
acctcgctgaacgccccgc

SEQ ID NO: 22486 - DNA, 19 bp, Homo sapiens
tacctcgctgaacgccccg

SEQ ID NO: 22487 - DNA, 19 bp, Homo sapiens
ctacctcgctgaacgcccc

SEQ ID NO: 22488 - DNA, 19 bp, Homo sapiens
gctacctcgctgaacgccc

SEQ ID NO: 22489 - DNA, 19 bp, Homo sapiens
cgctacctcgctgaacgcc

SEQ ID NO: 22490 - DNA, 19 bp, Homo sapiens
ccgctacctcgctgaacgc

SEQ ID NO: 22491 - DNA, 19 bp, Homo sapiens
accgctacctcgctgaacg

SEQ ID NO: 22492 - DNA, 19 bp, Homo sapiens
taccgctacctcgctgaac

SEQ ID NO: 22493 - DNA, 19 bp, Homo sapiens
ctaccgctacctcgctgaa

SEQ ID NO: 22494 - DNA, 19 bp, Homo sapiens
actaccgctacctcgctga

SEQ ID NO: 22495 - DNA, 19 bp, Homo sapiens
cactaccgctacctcgctg

SEQ ID NO: 22496 - DNA, 19 bp, Homo sapiens
tcactaccgctacctcgct

SEQ ID NO: 22497 - DNA, 19 bp, Homo sapiens
ttcactaccgctacctcgc

SEQ ID NO: 22498 - DNA, 19 bp, Homo sapiens
cttcactaccgctacctcg

SEQ ID NO: 22499 - DNA, 19 bp, Homo sapiens
tcttcactaccgctacctc

SEQ ID NO: 22500 - DNA, 19 bp, Homo sapiens
atcttcactaccgctacct

SEQ ID NO: 22501 - DNA, 19 bp, Homo sapiens
catcttcactaccgctacc

SEQ ID NO: 22502 - DNA, 19 bp, Homo sapiens
tcatcttcactaccgctac

SEQ ID NO: 22503 - DNA, 19 bp, Homo sapiens
ttcatcttcactaccgcta

SEQ ID NO: 22504 - DNA, 19 bp, Homo sapiens
cttcatcttcactaccgct

SEQ ID NO: 22505 - DNA, 19 bp, Homo sapiens
gcttcatcttcactaccgc

SEQ ID NO: 22506 - DNA, 19 bp, Homo sapiens
tgcttcatcttcactaccg

SEQ ID NO: 22507 - DNA, 19 bp, Homo sapiens
ctgcttcatcttcactacc

SEQ ID NO: 22508 - DNA, 19 bp, Homo sapiens
tctgcttcatcttcactac

SEQ ID NO: 22509 - DNA, 19 bp, Homo sapiens
gtctgcttcatcttcacta

SEQ ID NO: 22510 - DNA, 19 bp, Homo sapiens
cgtctgcttcatcttcact

SEQ ID NO: 22511 - DNA, 19 bp, Homo sapiens
ccgtctgcttcatcttcac

SEQ ID NO: 22512 - DNA, 19 bp, Homo sapiens
cccgtctgcttcatcttca

SEQ ID NO: 22513 - DNA, 19 bp, Homo sapiens
gcccgtctgcttcatcttc

SEQ ID NO: 22514 - DNA, 19 bp, Homo sapiens
ggcccgtctgcttcatctt

SEQ ID NO: 22515 - DNA, 19 bp, Homo sapiens
tggcccgtctgcttcatct

SEQ ID NO: 22516 - DNA, 19 bp, Homo sapiens
ctggcccgtctgcttcatc

SEQ ID NO: 22517 - DNA, 19 bp, Homo sapiens
cctggcccgtctgcttcat

SEQ ID NO: 22518 - DNA, 19 bp, Homo sapiens
acctggcccgtctgcttca

SEQ ID NO: 22519 - DNA, 19 bp, Homo sapiens
cacctggcccgtctgcttc

SEQ ID NO: 22520 - DNA, 19 bp, Homo sapiens
acacctggcccgtctgctt

SEQ ID NO: 22521 - DNA, 19 bp, Homo sapiens
tacacctggcccgtctgct

SEQ ID NO: 22522 - DNA, 19 bp, Homo sapiens
atacacctggcccgtctgc

SEQ ID NO: 22523 - DNA, 19 bp, Homo sapiens
catacacctggcccgtctg

SEQ ID NO: 22524 - DNA, 19 bp, Homo sapiens
gcatacacctggcccgtct

SEQ ID NO: 22525 - DNA, 19 bp, Homo sapiens
ggcatacacctggcccgtc

SEQ ID NO: 22526 - DNA, 19 bp, Homo sapiens
tggcatacacctggcccgt

SEQ ID NO: 22527 - DNA, 19 bp, Homo sapiens
atggcatacacctggcccg

SEQ ID NO: 22528 - DNA, 19 bp, Homo sapiens
catggcatacacctggccc

SEQ ID NO: 22529 - DNA, 19 bp, Homo sapiens
tcatggcatacacctggcc

SEQ ID NO: 22530 - DNA, 19 bp, Homo sapiens
ttcatggcatacacctggc

SEQ ID NO: 22531 - DNA, 19 bp, Homo sapiens
cttcatggcatacacctgg

SEQ ID NO: 22532 - DNA, 19 bp, Homo sapiens
tcttcatggcatacacctg

SEQ ID NO: 22533 - DNA, 19 bp, Homo sapiens
atcttcatggcatacacct

SEQ ID NO: 22534 - DNA, 19 bp, Homo sapiens
gatcttcatggcatacacc

SEQ ID NO: 22535 - DNA, 19 bp, Homo sapiens
tgatcttcatggcatacac

SEQ ID NO: 22536 - DNA, 19 bp, Homo sapiens
atgatcttcatggcataca

SEQ ID NO: 22537 - DNA, 19 bp, Homo sapiens
catgatcttcatggcatac

SEQ ID NO: 22538 - DNA, 19 bp, Homo sapiens
tcatgatcttcatggcata

SEQ ID NO: 22539 - DNA, 19 bp, Homo sapiens
ttcatgatcttcatggcat

SEQ ID NO: 22540 - DNA, 19 bp, Homo sapiens
gttcatgatcttcatggca

SEQ ID NO: 22541 - DNA, 19 bp, Homo sapiens
tgttcatgatcttcatggc

SEQ ID NO: 22542 - DNA, 19 bp, Homo sapiens
ttgttcatgatcttcatgg

SEQ ID NO: 22543 - DNA, 19 bp, Homo sapiens
cttgttcatgatcttcatg

SEQ ID NO: 22544 - DNA, 19 bp, Homo sapiens
acttgttcatgatcttcat

SEQ ID NO: 22545 - DNA, 19 bp, Homo sapiens
cacttgttcatgatcttca

SEQ ID NO: 22546 - DNA, 19 bp, Homo sapiens
ccacttgttcatgatcttc

SEQ ID NO: 22547 - DNA, 19 bp, Homo sapiens
cccacttgttcatgatctt

SEQ ID NO: 22548 - DNA, 19 bp, Homo sapiens
tcccacttgttcatgatct

SEQ ID NO: 22549 - DNA, 19 bp, Homo sapiens
gtcccacttgttcatgatc

SEQ ID NO: 22550 - DNA, 19 bp, Homo sapiens
tgtcccacttgttcatgat

SEQ ID NO: 22551 - DNA, 19 bp, Homo sapiens
atgtcccacttgttcatga

SEQ ID NO: 22552 - DNA, 19 bp, Homo sapiens
catgtcccacttgttcatg

SEQ ID NO: 22553 - DNA, 19 bp, Homo sapiens
gcatgtcccacttgttcat

SEQ ID NO: 22554 - DNA, 19 bp, Homo sapiens
agcatgtcccacttgttca

SEQ ID NO: 22555 - DNA, 19 bp, Homo sapiens
cagcatgtcccacttgttc

SEQ ID NO: 22556 - DNA, 19 bp, Homo sapiens
tcagcatgtcccacttgtt

SEQ ID NO: 22557 - DNA, 19 bp, Homo sapiens
ttcagcatgtcccacttgt

SEQ ID NO: 22558 - DNA, 19 bp, Homo sapiens
cttcagcatgtcccacttg

SEQ ID NO: 22559 - DNA, 19 bp, Homo sapiens
tcttcagcatgtcccactt

SEQ ID NO: 22560 - DNA, 19 bp, Homo sapiens
ctcttcagcatgtcccact

SEQ ID NO: 22561 - DNA, 19 bp, Homo sapiens
cctcttcagcatgtcccac

SEQ ID NO: 22562 - DNA, 19 bp, Homo sapiens
ccctcttcagcatgtccca

SEQ ID NO: 22563 - DNA, 19 bp, Homo sapiens
cccctcttcagcatgtccc

SEQ ID NO: 22564 - DNA, 19 bp, Homo sapiens
gcccctcttcagcatgtcc

SEQ ID NO: 22565 - DNA, 19 bp, Homo sapiens
cgcccctcttcagcatgtc

SEQ ID NO: 22566 - DNA, 19 bp, Homo sapiens
tcgcccctcttcagcatgt

SEQ ID NO: 22567 - DNA, 19 bp, Homo sapiens
ctcgcccctcttcagcatg

SEQ ID NO: 22568 - DNA, 19 bp, Homo sapiens
cctcgcccctcttcagcat

SEQ ID NO: 22569 - DNA, 19 bp, Homo sapiens
acctcgcccctcttcagca

SEQ ID NO: 22570 - DNA, 19 bp, Homo sapiens
cacctcgcccctcttcagc

SEQ ID NO: 22571 - DNA, 19 bp, Homo sapiens
acacctcgcccctcttcag

SEQ ID NO: 22572 - DNA, 19 bp, Homo sapiens
gacacctcgcccctcttca

SEQ ID NO: 22573 - DNA, 19 bp, Homo sapiens
cgacacctcgcccctcttc

SEQ ID NO: 22574 - DNA, 19 bp, Homo sapiens
acgacacctcgcccctctt

SEQ ID NO: 22575 - DNA, 19 bp, Homo sapiens
cacgacacctcgcccctct

SEQ ID NO: 22576 - DNA, 19 bp, Homo sapiens
gcacgacacctcgcccctc

SEQ ID NO: 22577 - DNA, 19 bp, Homo sapiens
agcacgacacctcgcccct

SEQ ID NO: 22578 - DNA, 19 bp, Homo sapiens
aagcacgacacctcgcccc

SEQ ID NO: 22579 - DNA, 19 bp, Homo sapiens
gaagcacgacacctcgccc

SEQ ID NO: 22580 - DNA, 19 bp, Homo sapiens
ggaagcacgacacctcgcc

SEQ ID NO: 22581 - DNA, 19 bp, Homo sapiens
cggaagcacgacacctcgc

SEQ ID NO: 22582 - DNA, 19 bp, Homo sapiens
acggaagcacgacacctcg

SEQ ID NO: 22583 - DNA, 19 bp, Homo sapiens
cacggaagcacgacacctc

SEQ ID NO: 22584 - DNA, 19 bp, Homo sapiens
tcacggaagcacgacacct

SEQ ID NO: 22585 - DNA, 19 bp, Homo sapiens
ctcacggaagcacgacacc

SEQ ID NO: 22586 - DNA, 19 bp, Homo sapiens
cctcacggaagcacgacac

SEQ ID NO: 22587 - DNA, 19 bp, Homo sapiens
tcctcacggaagcacgaca

SEQ ID NO: 22588 - DNA, 19 bp, Homo sapiens
ctcctcacggaagcacgac

SEQ ID NO: 22589 - DNA, 19 bp, Homo sapiens
tctcctcacggaagcacga

SEQ ID NO: 22590 - DNA, 19 bp, Homo sapiens
ctctcctcacggaagcacg

SEQ ID NO: 22591 - DNA, 19 bp, Homo sapiens
cctctcctcacggaagcac

SEQ ID NO: 22592 - DNA, 19 bp, Homo sapiens
ccctctcctcacggaagca

SEQ ID NO: 22593 - DNA, 19 bp, Homo sapiens
tccctctcctcacggaagc

SEQ ID NO: 22594 - DNA, 19 bp, Homo sapiens
gtccctctcctcacggaag

SEQ ID NO: 22595 - DNA, 19 bp, Homo sapiens
cgtccctctcctcacggaa

SEQ ID NO: 22596 - DNA, 19 bp, Homo sapiens
acgtccctctcctcacgga

SEQ ID NO: 22597 - DNA, 19 bp, Homo sapiens
cacgtccctctcctcacgg

SEQ ID NO: 22598 - DNA, 19 bp, Homo sapiens
acacgtccctctcctcacg

SEQ ID NO: 22599 - DNA, 19 bp, Homo sapiens
aacacgtccctctcctcac

SEQ ID NO: 22600 - DNA, 19 bp, Homo sapiens
caacacgtccctctcctca

SEQ ID NO: 22601 - DNA, 19 bp, Homo sapiens
ccaacacgtccctctcctc

SEQ ID NO: 22602 - DNA, 19 bp, Homo sapiens
accaacacgtccctctcct

SEQ ID NO: 22603 - DNA, 19 bp, Homo sapiens
caccaacacgtccctctcc

SEQ ID NO: 22604 - DNA, 19 bp, Homo sapiens
tcaccaacacgtccctctc

SEQ ID NO: 22605 - DNA, 19 bp, Homo sapiens
ttcaccaacacgtccctct

SEQ ID NO: 22606 - DNA, 19 bp, Homo sapiens
attcaccaacacgtccctc

SEQ ID NO: 22607 - DNA, 19 bp, Homo sapiens
cattcaccaacacgtccct

SEQ ID NO: 22608 - DNA, 19 bp, Homo sapiens
ccattcaccaacacgtccc

SEQ ID NO: 22609 - DNA, 19 bp, Homo sapiens
cccattcaccaacacgtcc

SEQ ID NO: 22610 - DNA, 19 bp, Homo sapiens
ccccattcaccaacacgtc

SEQ ID NO: 22611 - DNA, 19 bp, Homo sapiens
tccccattcaccaacacgt

SEQ ID NO: 22612 - DNA, 19 bp, Homo sapiens
gtccccattcaccaacacg

SEQ ID NO: 22613 - DNA, 19 bp, Homo sapiens
ggtccccattcaccaacac

SEQ ID NO: 22614 - DNA, 19 bp, Homo sapiens
cggtccccattcaccaaca

SEQ ID NO: 22615 - DNA, 19 bp, Homo sapiens
ccggtccccattcaccaac

SEQ ID NO: 22616 - DNA, 19 bp, Homo sapiens
gccggtccccattcaccaa

SEQ ID NO: 22617 - DNA, 19 bp, Homo sapiens
cgccggtccccattcacca

SEQ ID NO: 22618 - DNA, 19 bp, Homo sapiens
ccgccggtccccattcacc

SEQ ID NO: 22619 - DNA, 19 bp, Homo sapiens
accgccggtccccattcac

SEQ ID NO: 22620 - DNA, 19 bp, Homo sapiens
caccgccggtccccattca

SEQ ID NO: 22621 - DNA, 19 bp, Homo sapiens
ccaccgccggtccccattc

SEQ ID NO: 22622 - DNA, 19 bp, Homo sapiens
tccaccgccggtccccatt

SEQ ID NO: 22623 - DNA, 19 bp, Homo sapiens
atccaccgccggtccccat

SEQ ID NO: 22624 - DNA, 19 bp, Homo sapiens
gatccaccgccggtcccca

SEQ ID NO: 22625 - DNA, 19 bp, Homo sapiens
tgatccaccgccggtcccc

SEQ ID NO: 22626 - DNA, 19 bp, Homo sapiens
gtgatccaccgccggtccc

SEQ ID NO: 22627 - DNA, 19 bp, Homo sapiens
cgtgatccaccgccggtcc

SEQ ID NO: 22628 - DNA, 19 bp, Homo sapiens
gcgtgatccaccgccggtc

SEQ ID NO: 22629 - DNA, 19 bp, Homo sapiens
tgcgtgatccaccgccggt

SEQ ID NO: 22630 - DNA, 19 bp, Homo sapiens
ctgcgtgatccaccgccgg

SEQ ID NO: 22631 - DNA, 19 bp, Homo sapiens
gctgcgtgatccaccgccg

SEQ ID NO: 22632 - DNA, 19 bp, Homo sapiens
agctgcgtgatccaccgcc

SEQ ID NO: 22633 - DNA, 19 bp, Homo sapiens
cagctgcgtgatccaccgc

SEQ ID NO: 22634 - DNA, 19 bp, Homo sapiens
gcagctgcgtgatccaccg

SEQ ID NO: 22635 - DNA, 19 bp, Homo sapiens
tgcagctgcgtgatccacc

SEQ ID NO: 22636 - DNA, 19 bp, Homo sapiens
gtgcagctgcgtgatccac

SEQ ID NO: 22637 - DNA, 19 bp, Homo sapiens
agtgcagctgcgtgatcca

SEQ ID NO: 22638 - DNA, 19 bp, Homo sapiens
aagtgcagctgcgtgatcc

SEQ ID NO: 22639 - DNA, 19 bp, Homo sapiens
gaagtgcagctgcgtgatc

SEQ ID NO: 22640 - DNA, 19 bp, Homo sapiens
cgaagtgcagctgcgtgat

SEQ ID NO: 22641 - DNA, 19 bp, Homo sapiens
gcgaagtgcagctgcgtga

SEQ ID NO: 22642 - DNA, 19 bp, Homo sapiens
ggcgaagtgcagctgcgtg

SEQ ID NO: 22643 - DNA, 19 bp, Homo sapiens
aggcgaagtgcagctgcgt

SEQ ID NO: 22644 - DNA, 19 bp, Homo sapiens
aaggcgaagtgcagctgcg

SEQ ID NO: 22645 - DNA, 19 bp, Homo sapiens
gaaggcgaagtgcagctgc

SEQ ID NO: 22646 - DNA, 19 bp, Homo sapiens
ggaaggcgaagtgcagctg

SEQ ID NO: 22647 - DNA, 19 bp, Homo sapiens
tggaaggcgaagtgcagct

SEQ ID NO: 22648 - DNA, 19 bp, Homo sapiens
ctggaaggcgaagtgcagc

SEQ ID NO: 22649 - DNA, 19 bp, Homo sapiens
cctggaaggcgaagtgcag

SEQ ID NO: 22650 - DNA, 19 bp, Homo sapiens
tcctggaaggcgaagtgca

SEQ ID NO: 22651 - DNA, 19 bp, Homo sapiens
atcctggaaggcgaagtgc

SEQ ID NO: 22652 - DNA, 19 bp, Homo sapiens
catcctggaaggcgaagtg

SEQ ID NO: 22653 - DNA, 19 bp, Homo sapiens
tcatcctggaaggcgaagt

SEQ ID NO: 22654 - DNA, 19 bp, Homo sapiens
ctcatcctggaaggcgaag

SEQ ID NO: 22655 - DNA, 19 bp, Homo sapiens
tctcatcctggaaggcgaa

SEQ ID NO: 22656 - DNA, 19 bp, Homo sapiens
ttctcatcctggaaggcga

SEQ ID NO: 22657 - DNA, 19 bp, Homo sapiens
gttctcatcctggaaggcg

SEQ ID NO: 22658 - DNA, 19 bp, Homo sapiens
agttctcatcctggaaggc

SEQ ID NO: 22659 - DNA, 19 bp, Homo sapiens
tagttctcatcctggaagg

SEQ ID NO: 22660 - DNA, 19 bp, Homo sapiens
gtagttctcatcctggaag

SEQ ID NO: 22661 - DNA, 19 bp, Homo sapiens
ggtagttctcatcctggaa

SEQ ID NO: 22662 - DNA, 19 bp, Homo sapiens
aggtagttctcatcctgga

SEQ ID NO: 22663 - DNA, 19 bp, Homo sapiens
caggtagttctcatcctgg

SEQ ID NO: 22664 - DNA, 19 bp, Homo sapiens
acaggtagttctcatcctg

SEQ ID NO: 22665 - DNA, 19 bp, Homo sapiens
tacaggtagttctcatcct

SEQ ID NO: 22666 - DNA, 19 bp, Homo sapiens
gtacaggtagttctcatcc

SEQ ID NO: 22667 - DNA, 19 bp, Homo sapiens
ggtacaggtagttctcatc

SEQ ID NO: 22668 - DNA, 19 bp, Homo sapiens
aggtacaggtagttctcat

SEQ ID NO: 22669 - DNA, 19 bp, Homo sapiens
caggtacaggtagttctca

SEQ ID NO: 22670 - DNA, 19 bp, Homo sapiens
ccaggtacaggtagttctc

SEQ ID NO: 22671 - DNA, 19 bp, Homo sapiens
accaggtacaggtagttct

SEQ ID NO: 22672 - DNA, 19 bp, Homo sapiens
gaccaggtacaggtagttc

SEQ ID NO: 22673 - DNA, 19 bp, Homo sapiens
tgaccaggtacaggtagtt

SEQ ID NO: 22674 - DNA, 19 bp, Homo sapiens
atgaccaggtacaggtagt

SEQ ID NO: 22675 - DNA, 19 bp, Homo sapiens
catgaccaggtacaggtag

SEQ ID NO: 22676 - DNA, 19 bp, Homo sapiens
ccatgaccaggtacaggta

SEQ ID NO: 22677 - DNA, 19 bp, Homo sapiens
tccatgaccaggtacaggt

SEQ ID NO: 22678 - DNA, 19 bp, Homo sapiens
ctccatgaccaggtacagg

SEQ ID NO: 22679 - DNA, 19 bp, Homo sapiens
actccatgaccaggtacag

SEQ ID NO: 22680 - DNA, 19 bp, Homo sapiens
tactccatgaccaggtaca

SEQ ID NO: 22681 - DNA, 19 bp, Homo sapiens
atactccatgaccaggtac

SEQ ID NO: 22682 - DNA, 19 bp, Homo sapiens
aatactccatgaccaggta

SEQ ID NO: 22683 - DNA, 19 bp, Homo sapiens
taatactccatgaccaggt

SEQ ID NO: 22684 - DNA, 19 bp, Homo sapiens
gtaatactccatgaccagg

SEQ ID NO: 22685 - DNA, 19 bp, Homo sapiens
cgtaatactccatgaccag

SEQ ID NO: 22686 - DNA, 19 bp, Homo sapiens
acgtaatactccatgacca

SEQ ID NO: 22687 - DNA, 19 bp, Homo sapiens
cacgtaatactccatgacc

SEQ ID NO: 22688 - DNA, 19 bp, Homo sapiens
ccacgtaatactccatgac

SEQ ID NO: 22689 - DNA, 19 bp, Homo sapiens
cccacgtaatactccatga

SEQ ID NO: 22690 - DNA, 19 bp, Homo sapiens
gcccacgtaatactccatg

SEQ ID NO: 22691 - DNA, 19 bp, Homo sapiens
cgcccacgtaatactccat

SEQ ID NO: 22692 - DNA, 19 bp, Homo sapiens
ccgcccacgtaatactcca

SEQ ID NO: 22693 - DNA, 19 bp, Homo sapiens
cccgcccacgtaatactcc

SEQ ID NO: 22694 - DNA, 19 bp, Homo sapiens
ccccgcccacgtaatactc

SEQ ID NO: 22695 - DNA, 19 bp, Homo sapiens
tccccgcccacgtaatact

SEQ ID NO: 22696 - DNA, 19 bp, Homo sapiens
gtccccgcccacgtaatac

SEQ ID NO: 22697 - DNA, 19 bp, Homo sapiens
ggtccccgcccacgtaata

SEQ ID NO: 22698 - DNA, 19 bp, Homo sapiens
aggtccccgcccacgtaat

SEQ ID NO: 22699 - DNA, 19 bp, Homo sapiens
caggtccccgcccacgtaa

SEQ ID NO: 22700 - DNA, 19 bp, Homo sapiens
gcaggtccccgcccacgta

SEQ ID NO: 22701 - DNA, 19 bp, Homo sapiens
agcaggtccccgcccacgt

SEQ ID NO: 22702 - DNA, 19 bp, Homo sapiens
cagcaggtccccgcccacg

SEQ ID NO: 22703 - DNA, 19 bp, Homo sapiens
tcagcaggtccccgcccac

SEQ ID NO: 22704 - DNA, 19 bp, Homo sapiens
gtcagcaggtccccgccca

SEQ ID NO: 22705 - DNA, 19 bp, Homo sapiens
tgtcagcaggtccccgccc

SEQ ID NO: 22706 - DNA, 19 bp, Homo sapiens
gtgtcagcaggtccccgcc

SEQ ID NO: 22707 - DNA, 19 bp, Homo sapiens
agtgtcagcaggtccccgc

SEQ ID NO: 22708 - DNA, 19 bp, Homo sapiens
cagtgtcagcaggtccccg

SEQ ID NO: 22709 - DNA, 19 bp, Homo sapiens
gcagtgtcagcaggtcccc

SEQ ID NO: 22710 - DNA, 19 bp, Homo sapiens
agcagtgtcagcaggtccc

SEQ ID NO: 22711 - DNA, 19 bp, Homo sapiens
cagcagtgtcagcaggtcc

SEQ ID NO: 22712 - DNA, 19 bp, Homo sapiens
tcagcagtgtcagcaggtc

SEQ ID NO: 22713 - DNA, 19 bp, Homo sapiens
ctcagcagtgtcagcaggt

SEQ ID NO: 22714 - DNA, 19 bp, Homo sapiens
gctcagcagtgtcagcagg

SEQ ID NO: 22715 - DNA, 19 bp, Homo sapiens
tgctcagcagtgtcagcag

SEQ ID NO: 22716 - DNA, 19 bp, Homo sapiens
ttgctcagcagtgtcagca

SEQ ID NO: 22717 - DNA, 19 bp, Homo sapiens
cttgctcagcagtgtcagc

SEQ ID NO: 22718 - DNA, 19 bp, Homo sapiens
acttgctcagcagtgtcag

SEQ ID NO: 22719 - DNA, 19 bp, Homo sapiens
aacttgctcagcagtgtca

SEQ ID NO: 22720 - DNA, 19 bp, Homo sapiens
aaacttgctcagcagtgtc

SEQ ID NO: 22721 - DNA, 19 bp, Homo sapiens
caaacttgctcagcagtgt

SEQ ID NO: 22722 - DNA, 19 bp, Homo sapiens
ccaaacttgctcagcagtg

SEQ ID NO: 22723 - DNA, 19 bp, Homo sapiens
cccaaacttgctcagcagt

SEQ ID NO: 22724 - DNA, 19 bp, Homo sapiens
ccccaaacttgctcagcag

SEQ ID NO: 22725 - DNA, 19 bp, Homo sapiens
tccccaaacttgctcagca

SEQ ID NO: 22726 - DNA, 19 bp, Homo sapiens
ctccccaaacttgctcagc

SEQ ID NO: 22727 - DNA, 19 bp, Homo sapiens
gctccccaaacttgctcag

SEQ ID NO: 22728 - DNA, 19 bp, Homo sapiens
cgctccccaaacttgctca

SEQ ID NO: 22729 - DNA, 19 bp, Homo sapiens
ccgctccccaaacttgctc

SEQ ID NO: 22730 - DNA, 19 bp, Homo sapiens
tccgctccccaaacttgct

SEQ ID NO: 22731 - DNA, 19 bp, Homo sapiens
atccgctccccaaacttgc

SEQ ID NO: 22732 - DNA, 19 bp, Homo sapiens
aatccgctccccaaacttg

SEQ ID NO: 22733 - DNA, 19 bp, Homo sapiens
gaatccgctccccaaactt

SEQ ID NO: 22734 - DNA, 19 bp, Homo sapiens
ggaatccgctccccaaact

SEQ ID NO: 22735 - DNA, 19 bp, Homo sapiens
cggaatccgctccccaaac

SEQ ID NO: 22736 - DNA, 19 bp, Homo sapiens
ccggaatccgctccccaaa

SEQ ID NO: 22737 - DNA, 19 bp, Homo sapiens
gccggaatccgctccccaa

SEQ ID NO: 22738 - DNA, 19 bp, Homo sapiens
ggccggaatccgctcccca

SEQ ID NO: 22739 - DNA, 19 bp, Homo sapiens
cggccggaatccgctcccc

SEQ ID NO: 22740 - DNA, 19 bp, Homo sapiens
tcggccggaatccgctccc

SEQ ID NO: 22741 - DNA, 19 bp, Homo sapiens
ctcggccggaatccgctcc

SEQ ID NO: 22742 - DNA, 19 bp, Homo sapiens
tctcggccggaatccgctc

SEQ ID NO: 22743 - DNA, 19 bp, Homo sapiens
atctcggccggaatccgct

SEQ ID NO: 22744 - DNA, 19 bp, Homo sapiens
catctcggccggaatccgc

SEQ ID NO: 22745 - DNA, 19 bp, Homo sapiens
ccatctcggccggaatccg

SEQ ID NO: 22746 - DNA, 19 bp, Homo sapiens
gccatctcggccggaatcc

SEQ ID NO: 22747 - DNA, 19 bp, Homo sapiens
cgccatctcggccggaatc

SEQ ID NO: 22748 - DNA, 19 bp, Homo sapiens
gcgccatctcggccggaat

SEQ ID NO: 22749 - DNA, 19 bp, Homo sapiens
cgcgccatctcggccggaa

SEQ ID NO: 22750 - DNA, 19 bp, Homo sapiens
gcgcgccatctcggccgga

SEQ ID NO: 22751 - DNA, 19 bp, Homo sapiens
agcgcgccatctcggccgg

SEQ ID NO: 22752 - DNA, 19 bp, Homo sapiens
aagcgcgccatctcggccg

SEQ ID NO: 22753 - DNA, 19 bp, Homo sapiens
gaagcgcgccatctcggcc

SEQ ID NO: 22754 - DNA, 19 bp, Homo sapiens
agaagcgcgccatctcggc

SEQ ID NO: 22755 - DNA, 19 bp, Homo sapiens
tagaagcgcgccatctcgg

SEQ ID NO: 22756 - DNA, 19 bp, Homo sapiens
gtagaagcgcgccatctcg

SEQ ID NO: 22757 - DNA, 19 bp, Homo sapiens
ggtagaagcgcgccatctc

SEQ ID NO: 22758 - DNA, 19 bp, Homo sapiens
aggtagaagcgcgccatct

SEQ ID NO: 22759 - DNA, 19 bp, Homo sapiens
caggtagaagcgcgccatc

SEQ ID NO: 22760 - DNA, 19 bp, Homo sapiens
ccaggtagaagcgcgccat

SEQ ID NO: 22761 - DNA, 19 bp, Homo sapiens
gccaggtagaagcgcgcca

SEQ ID NO: 22762 - DNA, 19 bp, Homo sapiens
cgccaggtagaagcgcgcc

SEQ ID NO: 22763 - DNA, 19 bp, Homo sapiens
ccgccaggtagaagcgcgc

SEQ ID NO: 22764 - DNA, 19 bp, Homo sapiens
tccgccaggtagaagcgcg

SEQ ID NO: 22765 - DNA, 19 bp, Homo sapiens
ctccgccaggtagaagcgc

SEQ ID NO: 22766 - DNA, 19 bp, Homo sapiens
tctccgccaggtagaagcg

SEQ ID NO: 22767 - DNA, 19 bp, Homo sapiens
atctccgccaggtagaagc

SEQ ID NO: 22768 - DNA, 19 bp, Homo sapiens
aatctccgccaggtagaag

SEQ ID NO: 22769 - DNA, 19 bp, Homo sapiens
caatctccgccaggtagaa

SEQ ID NO: 22770 - DNA, 19 bp, Homo sapiens
acaatctccgccaggtaga

SEQ ID NO: 22771 - DNA, 19 bp, Homo sapiens
gacaatctccgccaggtag

SEQ ID NO: 22772 - DNA, 19 bp, Homo sapiens
tgacaatctccgccaggta

SEQ ID NO: 22773 - DNA, 19 bp, Homo sapiens
atgacaatctccgccaggt

SEQ ID NO: 22774 - DNA, 19 bp, Homo sapiens
catgacaatctccgccagg

SEQ ID NO: 22775 - DNA, 19 bp, Homo sapiens
ccatgacaatctccgccag

SEQ ID NO: 22776 - DNA, 19 bp, Homo sapiens
gccatgacaatctccgcca

SEQ ID NO: 22777 - DNA, 19 bp, Homo sapiens
ggccatgacaatctccgcc

SEQ ID NO: 22778 - DNA, 19 bp, Homo sapiens
tggccatgacaatctccgc

SEQ ID NO: 22779 - DNA, 19 bp, Homo sapiens
atggccatgacaatctccg

SEQ ID NO: 22780 - DNA, 19 bp, Homo sapiens
tatggccatgacaatctcc

SEQ ID NO: 22781 - DNA, 19 bp, Homo sapiens
ctatggccatgacaatctc

SEQ ID NO: 22782 - DNA, 19 bp, Homo sapiens
tctatggccatgacaatct

SEQ ID NO: 22783 - DNA, 19 bp, Homo sapiens
gtctatggccatgacaatc

SEQ ID NO: 22784 - DNA, 19 bp, Homo sapiens
agtctatggccatgacaat

SEQ ID NO: 22785 - DNA, 19 bp, Homo sapiens
gagtctatggccatgacaa

SEQ ID NO: 22786 - DNA, 19 bp, Homo sapiens
cgagtctatggccatgaca

SEQ ID NO: 22787 - DNA, 19 bp, Homo sapiens
ccgagtctatggccatgac

SEQ ID NO: 22788 - DNA, 19 bp, Homo sapiens
accgagtctatggccatga

SEQ ID NO: 22789 - DNA, 19 bp, Homo sapiens
caccgagtctatggccatg

SEQ ID NO: 22790 - DNA, 19 bp, Homo sapiens
gcaccgagtctatggccat

SEQ ID NO: 22791 - DNA, 19 bp, Homo sapiens
tgcaccgagtctatggcca

SEQ ID NO: 22792 - DNA, 19 bp, Homo sapiens
gtgcaccgagtctatggcc

SEQ ID NO: 22793 - DNA, 19 bp, Homo sapiens
ggtgcaccgagtctatggc

SEQ ID NO: 22794 - DNA, 19 bp, Homo sapiens
cggtgcaccgagtctatgg

SEQ ID NO: 22795 - DNA, 19 bp, Homo sapiens
ccggtgcaccgagtctatg

SEQ ID NO: 22796 - DNA, 19 bp, Homo sapiens
gccggtgcaccgagtctat

SEQ ID NO: 22797 - DNA, 19 bp, Homo sapiens
agccggtgcaccgagtcta

SEQ ID NO: 22798 - DNA, 19 bp, Homo sapiens
aagccggtgcaccgagtct

SEQ ID NO: 22799 - DNA, 19 bp, Homo sapiens
caagccggtgcaccgagtc

SEQ ID NO: 22800 - DNA, 19 bp, Homo sapiens
ccaagccggtgcaccgagt

SEQ ID NO: 22801 - DNA, 19 bp, Homo sapiens
gccaagccggtgcaccgag

SEQ ID NO: 22802 - DNA, 19 bp, Homo sapiens
agccaagccggtgcaccga

SEQ ID NO: 22803 - DNA, 19 bp, Homo sapiens
tagccaagccggtgcaccg

SEQ ID NO: 22804 - DNA, 19 bp, Homo sapiens
gtagccaagccggtgcacc

SEQ ID NO: 22805 - DNA, 19 bp, Homo sapiens
cgtagccaagccggtgcac

SEQ ID NO: 22806 - DNA, 19 bp, Homo sapiens
acgtagccaagccggtgca

SEQ ID NO: 22807 - DNA, 19 bp, Homo sapiens
cacgtagccaagccggtgc

SEQ ID NO: 22808 - DNA, 19 bp, Homo sapiens
gcacgtagccaagccggtg

SEQ ID NO: 22809 - DNA, 19 bp, Homo sapiens
tgcacgtagccaagccggt

SEQ ID NO: 22810 - DNA, 19 bp, Homo sapiens
gtgcacgtagccaagccgg

SEQ ID NO: 22811 - DNA, 19 bp, Homo sapiens
tgtgcacgtagccaagccg

SEQ ID NO: 22812 - DNA, 19 bp, Homo sapiens
ctgtgcacgtagccaagcc

SEQ ID NO: 22813 - DNA, 19 bp, Homo sapiens
cctgtgcacgtagccaagc

SEQ ID NO: 22814 - DNA, 19 bp, Homo sapiens
ccctgtgcacgtagccaag

SEQ ID NO: 22815 - DNA, 19 bp, Homo sapiens
tccctgtgcacgtagccaa

SEQ ID NO: 22816 - DNA, 19 bp, Homo sapiens
gtccctgtgcacgtagcca

SEQ ID NO: 22817 - DNA, 19 bp, Homo sapiens
tgtccctgtgcacgtagcc

SEQ ID NO: 22818 - DNA, 19 bp, Homo sapiens
atgtccctgtgcacgtagc

SEQ ID NO: 22819 - DNA, 19 bp, Homo sapiens
gatgtccctgtgcacgtag

SEQ ID NO: 22820 - DNA, 19 bp, Homo sapiens
tgatgtccctgtgcacgta

SEQ ID NO: 22821 - DNA, 19 bp, Homo sapiens
ttgatgtccctgtgcacgt

SEQ ID NO: 22822 - DNA, 19 bp, Homo sapiens
tttgatgtccctgtgcacg

SEQ ID NO: 22823 - DNA, 19 bp, Homo sapiens
gtttgatgtccctgtgcac

SEQ ID NO: 22824 - DNA, 19 bp, Homo sapiens
ggtttgatgtccctgtgca

SEQ ID NO: 22825 - DNA, 19 bp, Homo sapiens
gggtttgatgtccctgtgc

SEQ ID NO: 22826 - DNA, 19 bp, Homo sapiens
cgggtttgatgtccctgtg

SEQ ID NO: 22827 - DNA, 19 bp, Homo sapiens
tcgggtttgatgtccctgt

SEQ ID NO: 22828 - DNA, 19 bp, Homo sapiens
gtcgggtttgatgtccctg

SEQ ID NO: 22829 - DNA, 19 bp, Homo sapiens
tgtcgggtttgatgtccct

SEQ ID NO: 22830 - DNA, 19 bp, Homo sapiens
ttgtcgggtttgatgtccc

SEQ ID NO: 22831 - DNA, 19 bp, Homo sapiens
gttgtcgggtttgatgtcc

SEQ ID NO: 22832 - DNA, 19 bp, Homo sapiens
tgttgtcgggtttgatgtc

SEQ ID NO: 22833 - DNA, 19 bp, Homo sapiens
atgttgtcgggtttgatgt

SEQ ID NO: 22834 - DNA, 19 bp, Homo sapiens
gatgttgtcgggtttgatg

SEQ ID NO: 22835 - DNA, 19 bp, Homo sapiens
ggatgttgtcgggtttgat

SEQ ID NO: 22836 - DNA, 19 bp, Homo sapiens
aggatgttgtcgggtttga

SEQ ID NO: 22837 - DNA, 19 bp, Homo sapiens
caggatgttgtcgggtttg

SEQ ID NO: 22838 - DNA, 19 bp, Homo sapiens
gcaggatgttgtcgggttt

SEQ ID NO: 22839 - DNA, 19 bp, Homo sapiens
agcaggatgttgtcgggtt

SEQ ID NO: 22840 - DNA, 19 bp, Homo sapiens
cagcaggatgttgtcgggt

SEQ ID NO: 22841 - DNA, 19 bp, Homo sapiens
ccagcaggatgttgtcggg

SEQ ID NO: 22842 - DNA, 19 bp, Homo sapiens
tccagcaggatgttgtcgg

SEQ ID NO: 22843 - DNA, 19 bp, Homo sapiens
gtccagcaggatgttgtcg

SEQ ID NO: 22844 - DNA, 19 bp, Homo sapiens
ggtccagcaggatgttgtc

SEQ ID NO: 22845 - DNA, 19 bp, Homo sapiens
cggtccagcaggatgttgt

SEQ ID NO: 22846 - DNA, 19 bp, Homo sapiens
gcggtccagcaggatgttg

SEQ ID NO: 22847 - DNA, 19 bp, Homo sapiens
agcggtccagcaggatgtt

SEQ ID NO: 22848 - DNA, 19 bp, Homo sapiens
cagcggtccagcaggatgt

SEQ ID NO: 22849 - DNA, 19 bp, Homo sapiens
acagcggtccagcaggatg

SEQ ID NO: 22850 - DNA, 19 bp, Homo sapiens
cacagcggtccagcaggat

SEQ ID NO: 22851 - DNA, 19 bp, Homo sapiens
ccacagcggtccagcagga

SEQ ID NO: 22852 - DNA, 19 bp, Homo sapiens
gccacagcggtccagcagg

SEQ ID NO: 22853 - DNA, 19 bp, Homo sapiens
ggccacagcggtccagcag

SEQ ID NO: 22854 - DNA, 19 bp, Homo sapiens
tggccacagcggtccagca

SEQ ID NO: 22855 - DNA, 19 bp, Homo sapiens
gtggccacagcggtccagc

SEQ ID NO: 22856 - DNA, 19 bp, Homo sapiens
tgtggccacagcggtccag

SEQ ID NO: 22857 - DNA, 19 bp, Homo sapiens
atgtggccacagcggtcca

SEQ ID NO: 22858 - DNA, 19 bp, Homo sapiens
gatgtggccacagcggtcc

SEQ ID NO: 22859 - DNA, 19 bp, Homo sapiens
ggatgtggccacagcggtc

SEQ ID NO: 22860 - DNA, 19 bp, Homo sapiens
cggatgtggccacagcggt

SEQ ID NO: 22861 - DNA, 19 bp, Homo sapiens
gcggatgtggccacagcgg

SEQ ID NO: 22862 - DNA, 19 bp, Homo sapiens
ggcggatgtggccacagcg

SEQ ID NO: 22863 - DNA, 19 bp, Homo sapiens
aggcggatgtggccacagc

SEQ ID NO: 22864 - DNA, 19 bp, Homo sapiens
caggcggatgtggccacag

SEQ ID NO: 22865 - DNA, 19 bp, Homo sapiens
ccaggcggatgtggccaca

SEQ ID NO: 22866 - DNA, 19 bp, Homo sapiens
gccaggcggatgtggccac

SEQ ID NO: 22867 - DNA, 19 bp, Homo sapiens
ggccaggcggatgtggcca

SEQ ID NO: 22868 - DNA, 19 bp, Homo sapiens
cggccaggcggatgtggcc

SEQ ID NO: 22869 - DNA, 19 bp, Homo sapiens
tcggccaggcggatgtggc

SEQ ID NO: 22870 - DNA, 19 bp, Homo sapiens
gtcggccaggcggatgtgg

SEQ ID NO: 22871 - DNA, 19 bp, Homo sapiens
agtcggccaggcggatgtg

SEQ ID NO: 22872 - DNA, 19 bp, Homo sapiens
aagtcggccaggcggatgt

SEQ ID NO: 22873 - DNA, 19 bp, Homo sapiens
gaagtcggccaggcggatg

SEQ ID NO: 22874 - DNA, 19 bp, Homo sapiens
cgaagtcggccaggcggat

SEQ ID NO: 22875 - DNA, 19 bp, Homo sapiens
ccgaagtcggccaggcgga

SEQ ID NO: 22876 - DNA, 19 bp, Homo sapiens
gccgaagtcggccaggcgg

SEQ ID NO: 22877 - DNA, 19 bp, Homo sapiens
agccgaagtcggccaggcg

SEQ ID NO: 22878 - DNA, 19 bp, Homo sapiens
gagccgaagtcggccaggc

SEQ ID NO: 22879 - DNA, 19 bp, Homo sapiens
agagccgaagtcggccagg

SEQ ID NO: 22880 - DNA, 19 bp, Homo sapiens
aagagccgaagtcggccag

SEQ ID NO: 22881 - DNA, 19 bp, Homo sapiens
caagagccgaagtcggcca

SEQ ID NO: 22882 - DNA, 19 bp, Homo sapiens
gcaagagccgaagtcggcc

SEQ ID NO: 22883 - DNA, 19 bp, Homo sapiens
ggcaagagccgaagtcggc

SEQ ID NO: 22884 - DNA, 19 bp, Homo sapiens
aggcaagagccgaagtcgg

SEQ ID NO: 22885 - DNA, 19 bp, Homo sapiens
gaggcaagagccgaagtcg

SEQ ID NO: 22886 - DNA, 19 bp, Homo sapiens
tgaggcaagagccgaagtc

SEQ ID NO: 22887 - DNA, 19 bp, Homo sapiens
ttgaggcaagagccgaagt

SEQ ID NO: 22888 - DNA, 19 bp, Homo sapiens
cttgaggcaagagccgaag

SEQ ID NO: 22889 - DNA, 19 bp, Homo sapiens
gcttgaggcaagagccgaa

SEQ ID NO: 22890 - DNA, 19 bp, Homo sapiens
agcttgaggcaagagccga

SEQ ID NO: 22891 - DNA, 19 bp, Homo sapiens
cagcttgaggcaagagccg

SEQ ID NO: 22892 - DNA, 19 bp, Homo sapiens
gcagcttgaggcaagagcc

SEQ ID NO: 22893 - DNA, 19 bp, Homo sapiens
cgcagcttgaggcaagagc

SEQ ID NO: 22894 - DNA, 19 bp, Homo sapiens
ccgcagcttgaggcaagag

SEQ ID NO: 22895 - DNA, 19 bp, Homo sapiens
cccgcagcttgaggcaaga

SEQ ID NO: 22896 - DNA, 19 bp, Homo sapiens
gcccgcagcttgaggcaag

SEQ ID NO: 22897 - DNA, 19 bp, Homo sapiens
tgcccgcagcttgaggcaa

SEQ ID NO: 22898 - DNA, 19 bp, Homo sapiens
ctgcccgcagcttgaggca

SEQ ID NO: 22899 - DNA, 19 bp, Homo sapiens
tctgcccgcagcttgaggc

SEQ ID NO: 22900 - DNA, 19 bp, Homo sapiens
atctgcccgcagcttgagg

SEQ ID NO: 22901 - DNA, 19 bp, Homo sapiens
catctgcccgcagcttgag

SEQ ID NO: 22902 - DNA, 19 bp, Homo sapiens
ccatctgcccgcagcttga

SEQ ID NO: 22903 - DNA, 19 bp, Homo sapiens
tccatctgcccgcagcttg

SEQ ID NO: 22904 - DNA, 19 bp, Homo sapiens
ttccatctgcccgcagctt

SEQ ID NO: 22905 - DNA, 19 bp, Homo sapiens
gttccatctgcccgcagct

SEQ ID NO: 22906 - DNA, 19 bp, Homo sapiens
cgttccatctgcccgcagc

SEQ ID NO: 22907 - DNA, 19 bp, Homo sapiens
ccgttccatctgcccgcag

SEQ ID NO: 22908 - DNA, 19 bp, Homo sapiens
accgttccatctgcccgca

SEQ ID NO: 22909 - DNA, 19 bp, Homo sapiens
caccgttccatctgcccgc

SEQ ID NO: 22910 - DNA, 19 bp, Homo sapiens
gcaccgttccatctgcccg

SEQ ID NO: 22911 - DNA, 19 bp, Homo sapiens
cgcaccgttccatctgccc

SEQ ID NO: 22912 - DNA, 19 bp, Homo sapiens
ccgcaccgttccatctgcc

SEQ ID NO: 22913 - DNA, 19 bp, Homo sapiens
accgcaccgttccatctgc

SEQ ID NO: 22914 - DNA, 19 bp, Homo sapiens
gaccgcaccgttccatctg

SEQ ID NO: 22915 - DNA, 19 bp, Homo sapiens
cgaccgcaccgttccatct

SEQ ID NO: 22916 - DNA, 19 bp, Homo sapiens
gcgaccgcaccgttccatc

SEQ ID NO: 22917 - DNA, 19 bp, Homo sapiens
agcgaccgcaccgttccat

SEQ ID NO: 22918 - DNA, 19 bp, Homo sapiens
cagcgaccgcaccgttcca

SEQ ID NO: 22919 - DNA, 19 bp, Homo sapiens
ccagcgaccgcaccgttcc

SEQ ID NO: 22920 - DNA, 19 bp, Homo sapiens
accagcgaccgcaccgttc

SEQ ID NO: 22921 - DNA, 19 bp, Homo sapiens
caccagcgaccgcaccgtt

SEQ ID NO: 22922 - DNA, 19 bp, Homo sapiens
ccaccagcgaccgcaccgt

SEQ ID NO: 22923 - DNA, 19 bp, Homo sapiens
gccaccagcgaccgcaccg

SEQ ID NO: 22924 - DNA, 19 bp, Homo sapiens
agccaccagcgaccgcacc

SEQ ID NO: 22925 - DNA, 19 bp, Homo sapiens
cagccaccagcgaccgcac

SEQ ID NO: 22926 - DNA, 19 bp, Homo sapiens
acagccaccagcgaccgca

SEQ ID NO: 22927 - DNA, 19 bp, Homo sapiens
cacagccaccagcgaccgc

SEQ ID NO: 22928 - DNA, 19 bp, Homo sapiens
ccacagccaccagcgaccg

SEQ ID NO: 22929 - DNA, 19 bp, Homo sapiens
cccacagccaccagcgacc

SEQ ID NO: 22930 - DNA, 19 bp, Homo sapiens
gcccacagccaccagcgac

SEQ ID NO: 22931 - DNA, 19 bp, Homo sapiens
tgcccacagccaccagcga

SEQ ID NO: 22932 - DNA, 19 bp, Homo sapiens
gtgcccacagccaccagcg

SEQ ID NO: 22933 - DNA, 19 bp, Homo sapiens
ggtgcccacagccaccagc

SEQ ID NO: 22934 - DNA, 19 bp, Homo sapiens
gggtgcccacagccaccag

SEQ ID NO: 22935 - DNA, 19 bp, Homo sapiens
ggggtgcccacagccacca

SEQ ID NO: 22936 - DNA, 19 bp, Homo sapiens
tggggtgcccacagccacc

SEQ ID NO: 22937 - DNA, 19 bp, Homo sapiens
ctggggtgcccacagccac

SEQ ID NO: 22938 - DNA, 19 bp, Homo sapiens
tctggggtgcccacagcca

SEQ ID NO: 22939 - DNA, 19 bp, Homo sapiens
gtctggggtgcccacagcc

SEQ ID NO: 22940 - DNA, 19 bp, Homo sapiens
agtctggggtgcccacagc

SEQ ID NO: 22941 - DNA, 19 bp, Homo sapiens
tagtctggggtgcccacag

SEQ ID NO: 22942 - DNA, 19 bp, Homo sapiens
gtagtctggggtgcccaca

SEQ ID NO: 22943 - DNA, 19 bp, Homo sapiens
ggtagtctggggtgcccac

SEQ ID NO: 22944 - DNA, 19 bp, Homo sapiens
aggtagtctggggtgccca

SEQ ID NO: 22945 - DNA, 19 bp, Homo sapiens
caggtagtctggggtgccc

SEQ ID NO: 22946 - DNA, 19 bp, Homo sapiens
acaggtagtctggggtgcc

SEQ ID NO: 22947 - DNA, 19 bp, Homo sapiens
gacaggtagtctggggtgc

SEQ ID NO: 22948 - DNA, 19 bp, Homo sapiens
ggacaggtagtctggggtg

SEQ ID NO: 22949 - DNA, 19 bp, Homo sapiens
gggacaggtagtctggggt

SEQ ID NO: 22950 - DNA, 19 bp, Homo sapiens
ggggacaggtagtctgggg

SEQ ID NO: 22951 - DNA, 19 bp, Homo sapiens
gggggacaggtagtctggg

SEQ ID NO: 22952 - DNA, 19 bp, Homo sapiens
cgggggacaggtagtctgg

SEQ ID NO: 22953 - DNA, 19 bp, Homo sapiens
tcgggggacaggtagtctg

SEQ ID NO: 22954 - DNA, 19 bp, Homo sapiens
ctcgggggacaggtagtct

SEQ ID NO: 22955 - DNA, 19 bp, Homo sapiens
tctcgggggacaggtagtc

SEQ ID NO: 22956 - DNA, 19 bp, Homo sapiens
atctcgggggacaggtagt

SEQ ID NO: 22957 - DNA, 19 bp, Homo sapiens
gatctcgggggacaggtag

SEQ ID NO: 22958 - DNA, 19 bp, Homo sapiens
ggatctcgggggacaggta

SEQ ID NO: 22959 - DNA, 19 bp, Homo sapiens
aggatctcgggggacaggt

SEQ ID NO: 22960 - DNA, 19 bp, Homo sapiens
caggatctcgggggacagg

SEQ ID NO: 22961 - DNA, 19 bp, Homo sapiens
gcaggatctcgggggacag

SEQ ID NO: 22962 - DNA, 19 bp, Homo sapiens
tgcaggatctcgggggaca

SEQ ID NO: 22963 - DNA, 19 bp, Homo sapiens
ctgcaggatctcgggggac

SEQ ID NO: 22964 - DNA, 19 bp, Homo sapiens
cctgcaggatctcggggga

SEQ ID NO: 22965 - DNA, 19 bp, Homo sapiens
gcctgcaggatctcggggg

SEQ ID NO: 22966 - DNA, 19 bp, Homo sapiens
agcctgcaggatctcgggg

SEQ ID NO: 22967 - DNA, 19 bp, Homo sapiens
cagcctgcaggatctcggg

SEQ ID NO: 22968 - DNA, 19 bp, Homo sapiens
acagcctgcaggatctcgg

SEQ ID NO: 22969 - DNA, 19 bp, Homo sapiens
cacagcctgcaggatctcg

SEQ ID NO: 22970 - DNA, 19 bp, Homo sapiens
ccacagcctgcaggatctc

SEQ ID NO: 22971 - DNA, 19 bp, Homo sapiens
cccacagcctgcaggatct

SEQ ID NO: 22972 - DNA, 19 bp, Homo sapiens
gcccacagcctgcaggatc

SEQ ID NO: 22973 - DNA, 19 bp, Homo sapiens
cgcccacagcctgcaggat

SEQ ID NO: 22974 - DNA, 19 bp, Homo sapiens
ccgcccacagcctgcagga

SEQ ID NO: 22975 - DNA, 19 bp, Homo sapiens
accgcccacagcctgcagg

SEQ ID NO: 22976 - DNA, 19 bp, Homo sapiens
caccgcccacagcctgcag

SEQ ID NO: 22977 - DNA, 19 bp, Homo sapiens
ccaccgcccacagcctgca

SEQ ID NO: 22978 - DNA, 19 bp, Homo sapiens
cccaccgcccacagcctgc

SEQ ID NO: 22979 - DNA, 19 bp, Homo sapiens
gcccaccgcccacagcctg

SEQ ID NO: 22980 - DNA, 19 bp, Homo sapiens
ggcccaccgcccacagcct

SEQ ID NO: 22981 - DNA, 19 bp, Homo sapiens
aggcccaccgcccacagcc

SEQ ID NO: 22982 - DNA, 19 bp, Homo sapiens
caggcccaccgcccacagc

SEQ ID NO: 22983 - DNA, 19 bp, Homo sapiens
ccaggcccaccgcccacag

SEQ ID NO: 22984 - DNA, 19 bp, Homo sapiens
cccaggcccaccgcccaca

SEQ ID NO: 22985 - DNA, 19 bp, Homo sapiens
tcccaggcccaccgcccac

SEQ ID NO: 22986 - DNA, 19 bp, Homo sapiens
gtcccaggcccaccgccca

SEQ ID NO: 22987 - DNA, 19 bp, Homo sapiens
tgtcccaggcccaccgccc

SEQ ID NO: 22988 - DNA, 19 bp, Homo sapiens
ctgtcccaggcccaccgcc

SEQ ID NO: 22989 - DNA, 19 bp, Homo sapiens
cctgtcccaggcccaccgc

SEQ ID NO: 22990 - DNA, 19 bp, Homo sapiens
gcctgtcccaggcccaccg

SEQ ID NO: 22991 - DNA, 19 bp, Homo sapiens
tgcctgtcccaggcccacc

SEQ ID NO: 22992 - DNA, 19 bp, Homo sapiens
ctgcctgtcccaggcccac

SEQ ID NO: 22993 - DNA, 19 bp, Homo sapiens
gctgcctgtcccaggccca

SEQ ID NO: 22994 - DNA, 19 bp, Homo sapiens
agctgcctgtcccaggccc

SEQ ID NO: 22995 - DNA, 19 bp, Homo sapiens
tagctgcctgtcccaggcc

SEQ ID NO: 22996 - DNA, 19 bp, Homo sapiens
gtagctgcctgtcccaggc

SEQ ID NO: 22997 - DNA, 19 bp, Homo sapiens
cgtagctgcctgtcccagg

SEQ ID NO: 22998 - DNA, 19 bp, Homo sapiens
ccgtagctgcctgtcccag

SEQ ID NO: 22999 - DNA, 19 bp, Homo sapiens
cccgtagctgcctgtccca

SEQ ID NO: 23000 - DNA, 19 bp, Homo sapiens
gcccgtagctgcctgtccc

SEQ ID NO: 23001 - DNA, 19 bp, Homo sapiens
ggcccgtagctgcctgtcc

SEQ ID NO: 23002 - DNA, 19 bp, Homo sapiens
gggcccgtagctgcctgtc

SEQ ID NO: 23003 - DNA, 19 bp, Homo sapiens
cgggcccgtagctgcctgt

SEQ ID NO: 23004 - DNA, 19 bp, Homo sapiens
tcgggcccgtagctgcctg

SEQ ID NO: 23005 - DNA, 19 bp, Homo sapiens
ctcgggcccgtagctgcct

SEQ ID NO: 23006 - DNA, 19 bp, Homo sapiens
actcgggcccgtagctgcc

SEQ ID NO: 23007 - DNA, 19 bp, Homo sapiens
cactcgggcccgtagctgc

SEQ ID NO: 23008 - DNA, 19 bp, Homo sapiens
acactcgggcccgtagctg

SEQ ID NO: 23009 - DNA, 19 bp, Homo sapiens
cacactcgggcccgtagct

SEQ ID NO: 23010 - DNA, 19 bp, Homo sapiens
tcacactcgggcccgtagc

SEQ ID NO: 23011 - DNA, 19 bp, Homo sapiens
gtcacactcgggcccgtag

SEQ ID NO: 23012 - DNA, 19 bp, Homo sapiens
agtcacactcgggcccgta

SEQ ID NO: 23013 - DNA, 19 bp, Homo sapiens
cagtcacactcgggcccgt

SEQ ID NO: 23014 - DNA, 19 bp, Homo sapiens
ccagtcacactcgggcccg

SEQ ID NO: 23015 - DNA, 19 bp, Homo sapiens
accagtcacactcgggccc

SEQ ID NO: 23016 - DNA, 19 bp, Homo sapiens
caccagtcacactcgggcc

SEQ ID NO: 23017 - DNA, 19 bp, Homo sapiens
ccaccagtcacactcgggc

SEQ ID NO: 23018 - DNA, 19 bp, Homo sapiens
cccaccagtcacactcggg

SEQ ID NO: 23019 - DNA, 19 bp, Homo sapiens
gcccaccagtcacactcgg

SEQ ID NO: 23020 - DNA, 19 bp, Homo sapiens
cgcccaccagtcacactcg

SEQ ID NO: 23021 - DNA, 19 bp, Homo sapiens
gcgcccaccagtcacactc

SEQ ID NO: 23022 - DNA, 19 bp, Homo sapiens
agcgcccaccagtcacact

SEQ ID NO: 23023 - DNA, 19 bp, Homo sapiens
cagcgcccaccagtcacac

SEQ ID NO: 23024 - DNA, 19 bp, Homo sapiens
ccagcgcccaccagtcaca

SEQ ID NO: 23025 - DNA, 19 bp, Homo sapiens
cccagcgcccaccagtcac

SEQ ID NO: 23026 - DNA, 19 bp, Homo sapiens
acccagcgcccaccagtca

SEQ ID NO: 23027 - DNA, 19 bp, Homo sapiens
cacccagcgcccaccagtc

SEQ ID NO: 23028 - DNA, 19 bp, Homo sapiens
acacccagcgcccaccagt

SEQ ID NO: 23029 - DNA, 19 bp, Homo sapiens
tacacccagcgcccaccag

SEQ ID NO: 23030 - DNA, 19 bp, Homo sapiens
atacacccagcgcccacca

SEQ ID NO: 23031 - DNA, 19 bp, Homo sapiens
aatacacccagcgcccacc

SEQ ID NO: 23032 - DNA, 19 bp, Homo sapiens
gaatacacccagcgcccac

SEQ ID NO: 23033 - DNA, 19 bp, Homo sapiens
cgaatacacccagcgccca

SEQ ID NO: 23034 - DNA, 19 bp, Homo sapiens
gcgaatacacccagcgccc

SEQ ID NO: 23035 - DNA, 19 bp, Homo sapiens
ggcgaatacacccagcgcc

SEQ ID NO: 23036 - DNA, 19 bp, Homo sapiens
aggcgaatacacccagcgc

SEQ ID NO: 23037 - DNA, 19 bp, Homo sapiens
taggcgaatacacccagcg

SEQ ID NO: 23038 - DNA, 19 bp, Homo sapiens
ataggcgaatacacccagc

SEQ ID NO: 23039 - DNA, 19 bp, Homo sapiens
cataggcgaatacacccag

SEQ ID NO: 23040 - DNA, 19 bp, Homo sapiens
tcataggcgaatacaccca

SEQ ID NO: 23041 - DNA, 19 bp, Homo sapiens
ttcataggcgaatacaccc

SEQ ID NO: 23042 - DNA, 19 bp, Homo sapiens
tttcataggcgaatacacc

SEQ ID NO: 23043 - DNA, 19 bp, Homo sapiens
atttcataggcgaatacac

SEQ ID NO: 23044 - DNA, 19 bp, Homo sapiens
catttcataggcgaataca

SEQ ID NO: 23045 - DNA, 19 bp, Homo sapiens
acatttcataggcgaatac

SEQ ID NO: 23046 - DNA, 19 bp, Homo sapiens
aacatttcataggcgaata

SEQ ID NO: 23047 - DNA, 19 bp, Homo sapiens
gaacatttcataggcgaat

SEQ ID NO: 23048 - DNA, 19 bp, Homo sapiens
agaacatttcataggcgaa

SEQ ID NO: 23049 - DNA, 19 bp, Homo sapiens
tagaacatttcataggcga

SEQ ID NO: 23050 - DNA, 19 bp, Homo sapiens
atagaacatttcataggcg

SEQ ID NO: 23051 - DNA, 19 bp, Homo sapiens
catagaacatttcataggc

SEQ ID NO: 23052 - DNA, 19 bp, Homo sapiens
ccatagaacatttcatagg

SEQ ID NO: 23053 - DNA, 19 bp, Homo sapiens
cccatagaacatttcatag

SEQ ID NO: 23054 - DNA, 19 bp, Homo sapiens
gcccatagaacatttcata

SEQ ID NO: 23055 - DNA, 19 bp, Homo sapiens
tgcccatagaacatttcat

SEQ ID NO: 23056 - DNA, 19 bp, Homo sapiens
ctgcccatagaacatttca

SEQ ID NO: 23057 - DNA, 19 bp, Homo sapiens
tctgcccatagaacatttc

SEQ ID NO: 23058 - DNA, 19 bp, Homo sapiens
gtctgcccatagaacattt

SEQ ID NO: 23059 - DNA, 19 bp, Homo sapiens
cgtctgcccatagaacatt

SEQ ID NO: 23060 - DNA, 19 bp, Homo sapiens
gcgtctgcccatagaacat

SEQ ID NO: 23061 - DNA, 19 bp, Homo sapiens
ggcgtctgcccatagaaca

SEQ ID NO: 23062 - DNA, 19 bp, Homo sapiens
gggcgtctgcccatagaac

SEQ ID NO: 23063 - DNA, 19 bp, Homo sapiens
agggcgtctgcccatagaa

SEQ ID NO: 23064 - DNA, 19 bp, Homo sapiens
aagggcgtctgcccataga

SEQ ID NO: 23065 - DNA, 19 bp, Homo sapiens
gaagggcgtctgcccatag

SEQ ID NO: 23066 - DNA, 19 bp, Homo sapiens
agaagggcgtctgcccata

SEQ ID NO: 23067 - DNA, 19 bp, Homo sapiens
tagaagggcgtctgcccat

SEQ ID NO: 23068 - DNA, 19 bp, Homo sapiens
gtagaagggcgtctgccca

SEQ ID NO: 23069 - DNA, 19 bp, Homo sapiens
cgtagaagggcgtctgccc

SEQ ID NO: 23070 - DNA, 19 bp, Homo sapiens
gcgtagaagggcgtctgcc

SEQ ID NO: 23071 - DNA, 19 bp, Homo sapiens
cgcgtagaagggcgtctgc

SEQ ID NO: 23072 - DNA, 19 bp, Homo sapiens
ccgcgtagaagggcgtctg

SEQ ID NO: 23073 - DNA, 19 bp, Homo sapiens
tccgcgtagaagggcgtct

SEQ ID NO: 23074 - DNA, 19 bp, Homo sapiens
atccgcgtagaagggcgtc

SEQ ID NO: 23075 - DNA, 19 bp, Homo sapiens
aatccgcgtagaagggcgt

SEQ ID NO: 23076 - DNA, 19 bp, Homo sapiens
gaatccgcgtagaagggcg

SEQ ID NO: 23077 - DNA, 19 bp, Homo sapiens
ggaatccgcgtagaagggc

SEQ ID NO: 23078 - DNA, 19 bp, Homo sapiens
tggaatccgcgtagaaggg

SEQ ID NO: 23079 - DNA, 19 bp, Homo sapiens
gtggaatccgcgtagaagg

SEQ ID NO: 23080 - DNA, 19 bp, Homo sapiens
cgtggaatccgcgtagaag

SEQ ID NO: 23081 - DNA, 19 bp, Homo sapiens
ccgtggaatccgcgtagaa

SEQ ID NO: 23082 - DNA, 19 bp, Homo sapiens
gccgtggaatccgcgtaga

SEQ ID NO: 23083 - DNA, 19 bp, Homo sapiens
cgccgtggaatccgcgtag

SEQ ID NO: 23084 - DNA, 19 bp, Homo sapiens
ccgccgtggaatccgcgta

SEQ ID NO: 23085 - DNA, 19 bp, Homo sapiens
tccgccgtggaatccgcgt

SEQ ID NO: 23086 - DNA, 19 bp, Homo sapiens
ctccgccgtggaatccgcg

SEQ ID NO: 23087 - DNA, 19 bp, Homo sapiens
tctccgccgtggaatccgc

SEQ ID NO: 23088 - DNA, 19 bp, Homo sapiens
gtctccgccgtggaatccg

SEQ ID NO: 23089 - DNA, 19 bp, Homo sapiens
ggtctccgccgtggaatcc

SEQ ID NO: 23090 - DNA, 19 bp, Homo sapiens
aggtctccgccgtggaatc

SEQ ID NO: 23091 - DNA, 19 bp, Homo sapiens
taggtctccgccgtggaat

SEQ ID NO: 23092 - DNA, 19 bp, Homo sapiens
ataggtctccgccgtggaa

SEQ ID NO: 23093 - DNA, 19 bp, Homo sapiens
cataggtctccgccgtgga

SEQ ID NO: 23094 - DNA, 19 bp, Homo sapiens
ccataggtctccgccgtgg

SEQ ID NO: 23095 - DNA, 19 bp, Homo sapiens
gccataggtctccgccgtg

SEQ ID NO: 23096 - DNA, 19 bp, Homo sapiens
tgccataggtctccgccgt

SEQ ID NO: 23097 - DNA, 19 bp, Homo sapiens
ttgccataggtctccgccg

SEQ ID NO: 23098 - DNA, 19 bp, Homo sapiens
cttgccataggtctccgcc

SEQ ID NO: 23099 - DNA, 19 bp, Homo sapiens
tcttgccataggtctccgc

SEQ ID NO: 23100 - DNA, 19 bp, Homo sapiens
atcttgccataggtctccg

SEQ ID NO: 23101 - DNA, 19 bp, Homo sapiens
gatcttgccataggtctcc

SEQ ID NO: 23102 - DNA, 19 bp, Homo sapiens
cgatcttgccataggtctc

SEQ ID NO: 23103 - DNA, 19 bp, Homo sapiens
acgatcttgccataggtct

SEQ ID NO: 23104 - DNA, 19 bp, Homo sapiens
gacgatcttgccataggtc

SEQ ID NO: 23105 - DNA, 19 bp, Homo sapiens
ggacgatcttgccataggt

SEQ ID NO: 23106 - DNA, 19 bp, Homo sapiens
tggacgatcttgccatagg

SEQ ID NO: 23107 - DNA, 19 bp, Homo sapiens
gtggacgatcttgccatag

SEQ ID NO: 23108 - DNA, 19 bp, Homo sapiens
agtggacgatcttgccata

SEQ ID NO: 23109 - DNA, 19 bp, Homo sapiens
tagtggacgatcttgccat

SEQ ID NO: 23110 - DNA, 19 bp, Homo sapiens
gtagtggacgatcttgcca

SEQ ID NO: 23111 - DNA, 19 bp, Homo sapiens
tgtagtggacgatcttgcc

SEQ ID NO: 23112 - DNA, 19 bp, Homo sapiens
ttgtagtggacgatcttgc

SEQ ID NO: 23113 - DNA, 19 bp, Homo sapiens
cttgtagtggacgatcttg

SEQ ID NO: 23114 - DNA, 19 bp, Homo sapiens
ccttgtagtggacgatctt

SEQ ID NO: 23115 - DNA, 19 bp, Homo sapiens
tccttgtagtggacgatct

SEQ ID NO: 23116 - DNA, 19 bp, Homo sapiens
ctccttgtagtggacgatc

SEQ ID NO: 23117 - DNA, 19 bp, Homo sapiens
gctccttgtagtggacgat

SEQ ID NO: 23118 - DNA, 19 bp, Homo sapiens
tgctccttgtagtggacga

SEQ ID NO: 23119 - DNA, 19 bp, Homo sapiens
gtgctccttgtagtggacg

SEQ ID NO: 23120 - DNA, 19 bp, Homo sapiens
ggtgctccttgtagtggac

SEQ ID NO: 23121 - DNA, 19 bp, Homo sapiens
aggtgctccttgtagtgga

SEQ ID NO: 23122 - DNA, 19 bp, Homo sapiens
gaggtgctccttgtagtgg

SEQ ID NO: 23123 - DNA, 19 bp, Homo sapiens
agaggtgctccttgtagtg

SEQ ID NO: 23124 - DNA, 19 bp, Homo sapiens
gagaggtgctccttgtagt

SEQ ID NO: 23125 - DNA, 19 bp, Homo sapiens
agagaggtgctccttgtag

SEQ ID NO: 23126 - DNA, 19 bp, Homo sapiens
gagagaggtgctccttgta

SEQ ID NO: 23127 - DNA, 19 bp, Homo sapiens
agagagaggtgctccttgt

SEQ ID NO: 23128 - DNA, 19 bp, Homo sapiens
cagagagaggtgctccttg

SEQ ID NO: 23129 - DNA, 19 bp, Homo sapiens
gcagagagaggtgctcctt

SEQ ID NO: 23130 - DNA, 19 bp, Homo sapiens
ggcagagagaggtgctcct

SEQ ID NO: 23131 - DNA, 19 bp, Homo sapiens
cggcagagagaggtgctcc

SEQ ID NO: 23132 - DNA, 19 bp, Homo sapiens
gcggcagagagaggtgctc

SEQ ID NO: 23133 - DNA, 19 bp, Homo sapiens
agcggcagagagaggtgct

SEQ ID NO: 23134 - DNA, 19 bp, Homo sapiens
cagcggcagagagaggtgc

SEQ ID NO: 23135 - DNA, 19 bp, Homo sapiens
ccagcggcagagagaggtg

SEQ ID NO: 23136 - DNA, 19 bp, Homo sapiens
accagcggcagagagaggt

SEQ ID NO: 23137 - DNA, 19 bp, Homo sapiens
caccagcggcagagagagg

SEQ ID NO: 23138 - DNA, 19 bp, Homo sapiens
ccaccagcggcagagagag

SEQ ID NO: 23139 - DNA, 19 bp, Homo sapiens
tccaccagcggcagagaga

SEQ ID NO: 23140 - DNA, 19 bp, Homo sapiens
gtccaccagcggcagagag

SEQ ID NO: 23141 - DNA, 19 bp, Homo sapiens
cgtccaccagcggcagaga

SEQ ID NO: 23142 - DNA, 19 bp, Homo sapiens
tcgtccaccagcggcagag

SEQ ID NO: 23143 - DNA, 19 bp, Homo sapiens
ttcgtccaccagcggcaga

SEQ ID NO: 23144 - DNA, 19 bp, Homo sapiens
cttcgtccaccagcggcag

SEQ ID NO: 23145 - DNA, 19 bp, Homo sapiens
ccttcgtccaccagcggca

SEQ ID NO: 23146 - DNA, 19 bp, Homo sapiens
cccttcgtccaccagcggc

SEQ ID NO: 23147 - DNA, 19 bp, Homo sapiens
ccccttcgtccaccagcgg

SEQ ID NO: 23148 - DNA, 19 bp, Homo sapiens
accccttcgtccaccagcg

SEQ ID NO: 23149 - DNA, 19 bp, Homo sapiens
gaccccttcgtccaccagc

SEQ ID NO: 23150 - DNA, 19 bp, Homo sapiens
ggaccccttcgtccaccag

SEQ ID NO: 23151 - DNA, 19 bp, Homo sapiens
gggaccccttcgtccacca

SEQ ID NO: 23152 - DNA, 19 bp, Homo sapiens
agggaccccttcgtccacc

SEQ ID NO: 23153 - DNA, 19 bp, Homo sapiens
cagggaccccttcgtccac

SEQ ID NO: 23154 - DNA, 19 bp, Homo sapiens
tcagggaccccttcgtcca

SEQ ID NO: 23155 - DNA, 19 bp, Homo sapiens
ctcagggaccccttcgtcc

SEQ ID NO: 23156 - DNA, 19 bp, Homo sapiens
cctcagggaccccttcgtc

SEQ ID NO: 23157 - DNA, 19 bp, Homo sapiens
tcctcagggaccccttcgt

SEQ ID NO: 23158 - DNA, 19 bp, Homo sapiens
ctcctcagggaccccttcg

SEQ ID NO: 23159 - DNA, 19 bp, Homo sapiens
cctcctcagggaccccttc

SEQ ID NO: 23160 - DNA, 19 bp, Homo sapiens
gcctcctcagggacccctt

SEQ ID NO: 23161 - DNA, 19 bp, Homo sapiens
agcctcctcagggacccct

SEQ ID NO: 23162 - DNA, 19 bp, Homo sapiens
gagcctcctcagggacccc

SEQ ID NO: 23163 - DNA, 19 bp, Homo sapiens
cgagcctcctcagggaccc

SEQ ID NO: 23164 - DNA, 19 bp, Homo sapiens
tcgagcctcctcagggacc

SEQ ID NO: 23165 - DNA, 19 bp, Homo sapiens
ctcgagcctcctcagggac

SEQ ID NO: 23166 - DNA, 19 bp, Homo sapiens
tctcgagcctcctcaggga

SEQ ID NO: 23167 - DNA, 19 bp, Homo sapiens
gtctcgagcctcctcaggg

SEQ ID NO: 23168 - DNA, 19 bp, Homo sapiens
agtctcgagcctcctcagg

SEQ ID NO: 23169 - DNA, 19 bp, Homo sapiens
aagtctcgagcctcctcag

SEQ ID NO: 23170 - DNA, 19 bp, Homo sapiens
gaagtctcgagcctcctca

SEQ ID NO: 23171 - DNA, 19 bp, Homo sapiens
tgaagtctcgagcctcctc

SEQ ID NO: 23172 - DNA, 19 bp, Homo sapiens
atgaagtctcgagcctcct

SEQ ID NO: 23173 - DNA, 19 bp, Homo sapiens
aatgaagtctcgagcctcc

SEQ ID NO: 23174 - DNA, 19 bp, Homo sapiens
gaatgaagtctcgagcctc

SEQ ID NO: 23175 - DNA, 19 bp, Homo sapiens
tgaatgaagtctcgagcct

SEQ ID NO: 23176 - DNA, 19 bp, Homo sapiens
ctgaatgaagtctcgagcc

SEQ ID NO: 23177 - DNA, 19 bp, Homo sapiens
gctgaatgaagtctcgagc

SEQ ID NO: 23178 - DNA, 19 bp, Homo sapiens
cgctgaatgaagtctcgag

SEQ ID NO: 23179 - DNA, 19 bp, Homo sapiens
ccgctgaatgaagtctcga

SEQ ID NO: 23180 - DNA, 19 bp, Homo sapiens
accgctgaatgaagtctcg

SEQ ID NO: 23181 - DNA, 19 bp, Homo sapiens
aaccgctgaatgaagtctc

SEQ ID NO: 23182 - DNA, 19 bp, Homo sapiens
caaccgctgaatgaagtct

SEQ ID NO: 23183 - DNA, 19 bp, Homo sapiens
gcaaccgctgaatgaagtc

SEQ ID NO: 23184 - DNA, 19 bp, Homo sapiens
agcaaccgctgaatgaagt

SEQ ID NO: 23185 - DNA, 19 bp, Homo sapiens
cagcaaccgctgaatgaag

SEQ ID NO: 23186 - DNA, 19 bp, Homo sapiens
acagcaaccgctgaatgaa

SEQ ID NO: 23187 - DNA, 19 bp, Homo sapiens
cacagcaaccgctgaatga

SEQ ID NO: 23188 - DNA, 19 bp, Homo sapiens
acacagcaaccgctgaatg

SEQ ID NO: 23189 - DNA, 19 bp, Homo sapiens
gacacagcaaccgctgaat

SEQ ID NO: 23190 - DNA, 19 bp, Homo sapiens
ggacacagcaaccgctgaa

SEQ ID NO: 23191 - DNA, 19 bp, Homo sapiens
gggacacagcaaccgctga

SEQ ID NO: 23192 - DNA, 19 bp, Homo sapiens
ggggacacagcaaccgctg

SEQ ID NO: 23193 - DNA, 19 bp, Homo sapiens
gggggacacagcaaccgct

SEQ ID NO: 23194 - DNA, 19 bp, Homo sapiens
cgggggacacagcaaccgc

SEQ ID NO: 23195 - DNA, 19 bp, Homo sapiens
ccgggggacacagcaaccg

SEQ ID NO: 23196 - DNA, 19 bp, Homo sapiens
tccgggggacacagcaacc

SEQ ID NO: 23197 - DNA, 19 bp, Homo sapiens
ctccgggggacacagcaac

SEQ ID NO: 23198 - DNA, 19 bp, Homo sapiens
tctccgggggacacagcaa

SEQ ID NO: 23199 - DNA, 19 bp, Homo sapiens
gtctccgggggacacagca

SEQ ID NO: 23200 - DNA, 19 bp, Homo sapiens
tgtctccgggggacacagc

SEQ ID NO: 23201 - DNA, 19 bp, Homo sapiens
gtgtctccgggggacacag

SEQ ID NO: 23202 - DNA, 19 bp, Homo sapiens
cgtgtctccgggggacaca

SEQ ID NO: 23203 - DNA, 19 bp, Homo sapiens
ccgtgtctccgggggacac

SEQ ID NO: 23204 - DNA, 19 bp, Homo sapiens
gccgtgtctccgggggaca

SEQ ID NO: 23205 - DNA, 19 bp, Homo sapiens
agccgtgtctccgggggac

SEQ ID NO: 23206 - DNA, 19 bp, Homo sapiens
cagccgtgtctccggggga

SEQ ID NO: 23207 - DNA, 19 bp, Homo sapiens
ccagccgtgtctccggggg

SEQ ID NO: 23208 - DNA, 19 bp, Homo sapiens
cccagccgtgtctccgggg

SEQ ID NO: 23209 - DNA, 19 bp, Homo sapiens
gcccagccgtgtctccggg

SEQ ID NO: 23210 - DNA, 19 bp, Homo sapiens
ggcccagccgtgtctccgg

SEQ ID NO: 23211 - DNA, 19 bp, Homo sapiens
cggcccagccgtgtctccg

SEQ ID NO: 23212 - DNA, 19 bp, Homo sapiens
ccggcccagccgtgtctcc

SEQ ID NO: 23213 - DNA, 19 bp, Homo sapiens
cccggcccagccgtgtctc

SEQ ID NO: 23214 - DNA, 19 bp, Homo sapiens
ccccggcccagccgtgtct

SEQ ID NO: 23215 - DNA, 19 bp, Homo sapiens
accccggcccagccgtgtc

SEQ ID NO: 23216 - DNA, 19 bp, Homo sapiens
caccccggcccagccgtgt

SEQ ID NO: 23217 - DNA, 19 bp, Homo sapiens
ccaccccggcccagccgtg

SEQ ID NO: 23218 - DNA, 19 bp, Homo sapiens
tccaccccggcccagccgt

SEQ ID NO: 23219 - DNA, 19 bp, Homo sapiens
ctccaccccggcccagccg

SEQ ID NO: 23220 - DNA, 19 bp, Homo sapiens
gctccaccccggcccagcc

SEQ ID NO: 23221 - DNA, 19 bp, Homo sapiens
tgctccaccccggcccagc

SEQ ID NO: 23222 - DNA, 19 bp, Homo sapiens
ctgctccaccccggcccag

SEQ ID NO: 23223 - DNA, 19 bp, Homo sapiens
cctgctccaccccggccca

SEQ ID NO: 23224 - DNA, 19 bp, Homo sapiens
gcctgctccaccccggccc

SEQ ID NO: 23225 - DNA, 19 bp, Homo sapiens
cgcctgctccaccccggcc

SEQ ID NO: 23226 - DNA, 19 bp, Homo sapiens
tcgcctgctccaccccggc

SEQ ID NO: 23227 - DNA, 19 bp, Homo sapiens
gtcgcctgctccaccccgg

SEQ ID NO: 23228 - DNA, 19 bp, Homo sapiens
agtcgcctgctccaccccg

SEQ ID NO: 23229 - DNA, 19 bp, Homo sapiens
aagtcgcctgctccacccc

SEQ ID NO: 23230 - DNA, 19 bp, Homo sapiens
gaagtcgcctgctccaccc

SEQ ID NO: 23231 - DNA, 19 bp, Homo sapiens
ggaagtcgcctgctccacc

SEQ ID NO: 23232 - DNA, 19 bp, Homo sapiens
cggaagtcgcctgctccac

SEQ ID NO: 23233 - DNA, 19 bp, Homo sapiens
ccggaagtcgcctgctcca

SEQ ID NO: 23234 - DNA, 19 bp, Homo sapiens
tccggaagtcgcctgctcc

SEQ ID NO: 23235 - DNA, 19 bp, Homo sapiens
gtccggaagtcgcctgctc

SEQ ID NO: 23236 - DNA, 19 bp, Homo sapiens
tgtccggaagtcgcctgct

SEQ ID NO: 23237 - DNA, 19 bp, Homo sapiens
gtgtccggaagtcgcctgc

SEQ ID NO: 23238 - DNA, 19 bp, Homo sapiens
tgtgtccggaagtcgcctg

SEQ ID NO: 23239 - DNA, 19 bp, Homo sapiens
atgtgtccggaagtcgcct

SEQ ID NO: 23240 - DNA, 19 bp, Homo sapiens
gatgtgtccggaagtcgcc

SEQ ID NO: 23241 - DNA, 19 bp, Homo sapiens
ggatgtgtccggaagtcgc

SEQ ID NO: 23242 - DNA, 19 bp, Homo sapiens
gggatgtgtccggaagtcg

SEQ ID NO: 23243 - DNA, 19 bp, Homo sapiens
agggatgtgtccggaagtc

SEQ ID NO: 23244 - DNA, 19 bp, Homo sapiens
aagggatgtgtccggaagt

SEQ ID NO: 23245 - DNA, 19 bp, Homo sapiens
gaagggatgtgtccggaag

SEQ ID NO: 23246 - DNA, 19 bp, Homo sapiens
agaagggatgtgtccggaa

SEQ ID NO: 23247 - DNA, 19 bp, Homo sapiens
aagaagggatgtgtccgga

SEQ ID NO: 23248 - DNA, 19 bp, Homo sapiens
gaagaagggatgtgtccgg

SEQ ID NO: 23249 - DNA, 19 bp, Homo sapiens
agaagaagggatgtgtccg

SEQ ID NO: 23250 - DNA, 19 bp, Homo sapiens
aagaagaagggatgtgtcc

SEQ ID NO: 23251 - DNA, 19 bp, Homo sapiens
aaagaagaagggatgtgtc

SEQ ID NO: 23252 - DNA, 19 bp, Homo sapiens
caaagaagaagggatgtgt

SEQ ID NO: 23253 - DNA, 19 bp, Homo sapiens
ccaaagaagaagggatgtg

SEQ ID NO: 23254 - DNA, 19 bp, Homo sapiens
gccaaagaagaagggatgt

SEQ ID NO: 23255 - DNA, 19 bp, Homo sapiens
ggccaaagaagaagggatg

SEQ ID NO: 23256 - DNA, 19 bp, Homo sapiens
aggccaaagaagaagggat

SEQ ID NO: 23257 - DNA, 19 bp, Homo sapiens
gaggccaaagaagaaggga

SEQ ID NO: 23258 - DNA, 19 bp, Homo sapiens
cgaggccaaagaagaaggg

SEQ ID NO: 23259 - DNA, 19 bp, Homo sapiens
tcgaggccaaagaagaagg

SEQ ID NO: 23260 - DNA, 19 bp, Homo sapiens
gtcgaggccaaagaagaag

SEQ ID NO: 23261 - DNA, 19 bp, Homo sapiens
agtcgaggccaaagaagaa

SEQ ID NO: 23262 - DNA, 19 bp, Homo sapiens
cagtcgaggccaaagaaga

SEQ ID NO: 23263 - DNA, 19 bp, Homo sapiens
ccagtcgaggccaaagaag

SEQ ID NO: 23264 - DNA, 19 bp, Homo sapiens
cccagtcgaggccaaagaa

SEQ ID NO: 23265 - DNA, 19 bp, Homo sapiens
tcccagtcgaggccaaaga

SEQ ID NO: 23266 - DNA, 19 bp, Homo sapiens
atcccagtcgaggccaaag

SEQ ID NO: 23267 - DNA, 19 bp, Homo sapiens
catcccagtcgaggccaaa

SEQ ID NO: 23268 - DNA, 19 bp, Homo sapiens
ccatcccagtcgaggccaa

SEQ ID NO: 23269 - DNA, 19 bp, Homo sapiens
accatcccagtcgaggcca

SEQ ID NO: 23270 - DNA, 19 bp, Homo sapiens
gaccatcccagtcgaggcc

SEQ ID NO: 23271 - DNA, 19 bp, Homo sapiens
agaccatcccagtcgaggc

SEQ ID NO: 23272 - DNA, 19 bp, Homo sapiens
gagaccatcccagtcgagg

SEQ ID NO: 23273 - DNA, 19 bp, Homo sapiens
ggagaccatcccagtcgag

SEQ ID NO: 23274 - DNA, 19 bp, Homo sapiens
cggagaccatcccagtcga

SEQ ID NO: 23275 - DNA, 19 bp, Homo sapiens
ccggagaccatcccagtcg

SEQ ID NO: 23276 - DNA, 19 bp, Homo sapiens
cccggagaccatcccagtc

SEQ ID NO: 23277 - DNA, 19 bp, Homo sapiens
tcccggagaccatcccagt

SEQ ID NO: 23278 - DNA, 19 bp, Homo sapiens
gtcccggagaccatcccag

SEQ ID NO: 23279 - DNA, 19 bp, Homo sapiens
tgtcccggagaccatccca

SEQ ID NO: 23280 - DNA, 19 bp, Homo sapiens
ctgtcccggagaccatccc

SEQ ID NO: 23281 - DNA, 19 bp, Homo sapiens
gctgtcccggagaccatcc

SEQ ID NO: 23282 - DNA, 19 bp, Homo sapiens
cgctgtcccggagaccatc

SEQ ID NO: 23283 - DNA, 19 bp, Homo sapiens
acgctgtcccggagaccat

SEQ ID NO: 23284 - DNA, 19 bp, Homo sapiens
cacgctgtcccggagacca

SEQ ID NO: 23285 - DNA, 19 bp, Homo sapiens
gcacgctgtcccggagacc

SEQ ID NO: 23286 - DNA, 19 bp, Homo sapiens
ggcacgctgtcccggagac

SEQ ID NO: 23287 - DNA, 19 bp, Homo sapiens
gggcacgctgtcccggaga

SEQ ID NO: 23288 - DNA, 19 bp, Homo sapiens
ggggcacgctgtcccggag

SEQ ID NO: 23289 - DNA, 19 bp, Homo sapiens
gggggcacgctgtcccgga

SEQ ID NO: 23290 - DNA, 19 bp, Homo sapiens
ggggggcacgctgtcccgg

SEQ ID NO: 23291 - DNA, 19 bp, Homo sapiens
aggggggcacgctgtcccg

SEQ ID NO: 23292 - DNA, 19 bp, Homo sapiens
aaggggggcacgctgtccc

SEQ ID NO: 23293 - DNA, 19 bp, Homo sapiens
aaaggggggcacgctgtcc

SEQ ID NO: 23294 - DNA, 19 bp, Homo sapiens
taaaggggggcacgctgtc

SEQ ID NO: 23295 - DNA, 19 bp, Homo sapiens
gtaaaggggggcacgctgt

SEQ ID NO: 23296 - DNA, 19 bp, Homo sapiens
tgtaaaggggggcacgctg

SEQ ID NO: 23297 - DNA, 19 bp, Homo sapiens
gtgtaaaggggggcacgct

SEQ ID NO: 23298 - DNA, 19 bp, Homo sapiens
ggtgtaaaggggggcacgc

SEQ ID NO: 23299 - DNA, 19 bp, Homo sapiens
cggtgtaaaggggggcacg

SEQ ID NO: 23300 - DNA, 19 bp, Homo sapiens
ccggtgtaaaggggggcac

SEQ ID NO: 23301 - DNA, 19 bp, Homo sapiens
tccggtgtaaaggggggca

SEQ ID NO: 23302 - DNA, 19 bp, Homo sapiens
atccggtgtaaaggggggc

SEQ ID NO: 23303 - DNA, 19 bp, Homo sapiens
aatccggtgtaaagggggg

SEQ ID NO: 23304 - DNA, 19 bp, Homo sapiens
aaatccggtgtaaaggggg

SEQ ID NO: 23305 - DNA, 19 bp, Homo sapiens
gaaatccggtgtaaagggg

SEQ ID NO: 23306 - DNA, 19 bp, Homo sapiens
cgaaatccggtgtaaaggg

SEQ ID NO: 23307 - DNA, 19 bp, Homo sapiens
tcgaaatccggtgtaaagg

SEQ ID NO: 23308 - DNA, 19 bp, Homo sapiens
ttcgaaatccggtgtaaag

SEQ ID NO: 23309 - DNA, 19 bp, Homo sapiens
cttcgaaatccggtgtaaa

SEQ ID NO: 23310 - DNA, 19 bp, Homo sapiens
ccttcgaaatccggtgtaa

SEQ ID NO: 23311 - DNA, 19 bp, Homo sapiens
accttcgaaatccggtgta

SEQ ID NO: 23312 - DNA, 19 bp, Homo sapiens
caccttcgaaatccggtgt

SEQ ID NO: 23313 - DNA, 19 bp, Homo sapiens
gcaccttcgaaatccggtg

SEQ ID NO: 23314 - DNA, 19 bp, Homo sapiens
ggcaccttcgaaatccggt

SEQ ID NO: 23315 - DNA, 19 bp, Homo sapiens
tggcaccttcgaaatccgg

SEQ ID NO: 23316 - DNA, 19 bp, Homo sapiens
gtggcaccttcgaaatccg

SEQ ID NO: 23317 - DNA, 19 bp, Homo sapiens
ggtggcaccttcgaaatcc

SEQ ID NO: 23318 - DNA, 19 bp, Homo sapiens
cggtggcaccttcgaaatc

SEQ ID NO: 23319 - DNA, 19 bp, Homo sapiens
tcggtggcaccttcgaaat

SEQ ID NO: 23320 - DNA, 19 bp, Homo sapiens
gtcggtggcaccttcgaaa

SEQ ID NO: 23321 - DNA, 19 bp, Homo sapiens
tgtcggtggcaccttcgaa

SEQ ID NO: 23322 - DNA, 19 bp, Homo sapiens
gtgtcggtggcaccttcga

SEQ ID NO: 23323 - DNA, 19 bp, Homo sapiens
tgtgtcggtggcaccttcg

SEQ ID NO: 23324 - DNA, 19 bp, Homo sapiens
atgtgtcggtggcaccttc

SEQ ID NO: 23325 - DNA, 19 bp, Homo sapiens
catgtgtcggtggcacctt

SEQ ID NO: 23326 - DNA, 19 bp, Homo sapiens
gcatgtgtcggtggcacct

SEQ ID NO: 23327 - DNA, 19 bp, Homo sapiens
tgcatgtgtcggtggcacc

SEQ ID NO: 23328 - DNA, 19 bp, Homo sapiens
ttgcatgtgtcggtggcac

SEQ ID NO: 23329 - DNA, 19 bp, Homo sapiens
gttgcatgtgtcggtggca

SEQ ID NO: 23330 - DNA, 19 bp, Homo sapiens
agttgcatgtgtcggtggc

SEQ ID NO: 23331 - DNA, 19 bp, Homo sapiens
aagttgcatgtgtcggtgg

SEQ ID NO: 23332 - DNA, 19 bp, Homo sapiens
gaagttgcatgtgtcggtg

SEQ ID NO: 23333 - DNA, 19 bp, Homo sapiens
cgaagttgcatgtgtcggt

SEQ ID NO: 23334 - DNA, 19 bp, Homo sapiens
tcgaagttgcatgtgtcgg

SEQ ID NO: 23335 - DNA, 19 bp, Homo sapiens
gtcgaagttgcatgtgtcg

SEQ ID NO: 23336 - DNA, 19 bp, Homo sapiens
agtcgaagttgcatgtgtc

SEQ ID NO: 23337 - DNA, 19 bp, Homo sapiens
aagtcgaagttgcatgtgt

SEQ ID NO: 23338 - DNA, 19 bp, Homo sapiens
caagtcgaagttgcatgtg

SEQ ID NO: 23339 - DNA, 19 bp, Homo sapiens
ccaagtcgaagttgcatgt

SEQ ID NO: 23340 - DNA, 19 bp, Homo sapiens
accaagtcgaagttgcatg

SEQ ID NO: 23341 - DNA, 19 bp, Homo sapiens
caccaagtcgaagttgcat

SEQ ID NO: 23342 - DNA, 19 bp, Homo sapiens
ccaccaagtcgaagttgca

SEQ ID NO: 23343 - DNA, 19 bp, Homo sapiens
tccaccaagtcgaagttgc

SEQ ID NO: 23344 - DNA, 19 bp, Homo sapiens
ctccaccaagtcgaagttg

SEQ ID NO: 23345 - DNA, 19 bp, Homo sapiens
cctccaccaagtcgaagtt

SEQ ID NO: 23346 - DNA, 19 bp, Homo sapiens
tcctccaccaagtcgaagt

SEQ ID NO: 23347 - DNA, 19 bp, Homo sapiens
gtcctccaccaagtcgaag

SEQ ID NO: 23348 - DNA, 19 bp, Homo sapiens
cgtcctccaccaagtcgaa

SEQ ID NO: 23349 - DNA, 19 bp, Homo sapiens
ccgtcctccaccaagtcga

SEQ ID NO: 23350 - DNA, 19 bp, Homo sapiens
cccgtcctccaccaagtcg

SEQ ID NO: 23351 - DNA, 19 bp, Homo sapiens
gcccgtcctccaccaagtc

SEQ ID NO: 23352 - DNA, 19 bp, Homo sapiens
agcccgtcctccaccaagt

SEQ ID NO: 23353 - DNA, 19 bp, Homo sapiens
gagcccgtcctccaccaag

SEQ ID NO: 23354 - DNA, 19 bp, Homo sapiens
tgagcccgtcctccaccaa

SEQ ID NO: 23355 - DNA, 19 bp, Homo sapiens
gtgagcccgtcctccacca

SEQ ID NO: 23356 - DNA, 19 bp, Homo sapiens
agtgagcccgtcctccacc

SEQ ID NO: 23357 - DNA, 19 bp, Homo sapiens
cagtgagcccgtcctccac

SEQ ID NO: 23358 - DNA, 19 bp, Homo sapiens
gcagtgagcccgtcctcca

SEQ ID NO: 23359 - DNA, 19 bp, Homo sapiens
ggcagtgagcccgtcctcc

SEQ ID NO: 23360 - DNA, 19 bp, Homo sapiens
tggcagtgagcccgtcctc

SEQ ID NO: 23361 - DNA, 19 bp, Homo sapiens
atggcagtgagcccgtcct

SEQ ID NO: 23362 - DNA, 19 bp, Homo sapiens
catggcagtgagcccgtcc

SEQ ID NO: 23363 - DNA, 19 bp, Homo sapiens
ccatggcagtgagcccgtc

SEQ ID NO: 23364 - DNA, 19 bp, Homo sapiens
tccatggcagtgagcccgt

SEQ ID NO: 23365 - DNA, 19 bp, Homo sapiens
ctccatggcagtgagcccg

SEQ ID NO: 23366 - DNA, 19 bp, Homo sapiens
tctccatggcagtgagccc

SEQ ID NO: 23367 - DNA, 19 bp, Homo sapiens
gtctccatggcagtgagcc

SEQ ID NO: 23368 - DNA, 19 bp, Homo sapiens
tgtctccatggcagtgagc

SEQ ID NO: 23369 - DNA, 19 bp, Homo sapiens
gtgtctccatggcagtgag

SEQ ID NO: 23370 - DNA, 19 bp, Homo sapiens
agtgtctccatggcagtga

SEQ ID NO: 23371 - DNA, 19 bp, Homo sapiens
cagtgtctccatggcagtg

SEQ ID NO: 23372 - DNA, 19 bp, Homo sapiens
acagtgtctccatggcagt

SEQ ID NO: 23373 - DNA, 19 bp, Homo sapiens
gacagtgtctccatggcag

SEQ ID NO: 23374 - DNA, 19 bp, Homo sapiens
cgacagtgtctccatggca

SEQ ID NO: 23375 - DNA, 19 bp, Homo sapiens
ccgacagtgtctccatggc

SEQ ID NO: 23376 - DNA, 19 bp, Homo sapiens
tccgacagtgtctccatgg

SEQ ID NO: 23377 - DNA, 19 bp, Homo sapiens
gtccgacagtgtctccatg

SEQ ID NO: 23378 - DNA, 19 bp, Homo sapiens
tgtccgacagtgtctccat

SEQ ID NO: 23379 - DNA, 19 bp, Homo sapiens
atgtccgacagtgtctcca

SEQ ID NO: 23380 - DNA, 19 bp, Homo sapiens
aatgtccgacagtgtctcc

SEQ ID NO: 23381 - DNA, 19 bp, Homo sapiens
gaatgtccgacagtgtctc

SEQ ID NO: 23382 - DNA, 19 bp, Homo sapiens
cgaatgtccgacagtgtct

SEQ ID NO: 23383 - DNA, 19 bp, Homo sapiens
ccgaatgtccgacagtgtc

SEQ ID NO: 23384 - DNA, 19 bp, Homo sapiens
cccgaatgtccgacagtgt

SEQ ID NO: 23385 - DNA, 19 bp, Homo sapiens
tcccgaatgtccgacagtg

SEQ ID NO: 23386 - DNA, 19 bp, Homo sapiens
ttcccgaatgtccgacagt

SEQ ID NO: 23387 - DNA, 19 bp, Homo sapiens
cttcccgaatgtccgacag

SEQ ID NO: 23388 - DNA, 19 bp, Homo sapiens
ccttcccgaatgtccgaca

SEQ ID NO: 23389 - DNA, 19 bp, Homo sapiens
accttcccgaatgtccgac

SEQ ID NO: 23390 - DNA, 19 bp, Homo sapiens
caccttcccgaatgtccga

SEQ ID NO: 23391 - DNA, 19 bp, Homo sapiens
gcaccttcccgaatgtccg

SEQ ID NO: 23392 - DNA, 19 bp, Homo sapiens
cgcaccttcccgaatgtcc

SEQ ID NO: 23393 - DNA, 19 bp, Homo sapiens
gcgcaccttcccgaatgtc

SEQ ID NO: 23394 - DNA, 19 bp, Homo sapiens
ggcgcaccttcccgaatgt

SEQ ID NO: 23395 - DNA, 19 bp, Homo sapiens
cggcgcaccttcccgaatg

SEQ ID NO: 23396 - DNA, 19 bp, Homo sapiens
gcggcgcaccttcccgaat

SEQ ID NO: 23397 - DNA, 19 bp, Homo sapiens
agcggcgcaccttcccgaa

SEQ ID NO: 23398 - DNA, 19 bp, Homo sapiens
tagcggcgcaccttcccga

SEQ ID NO: 23399 - DNA, 19 bp, Homo sapiens
ctagcggcgcaccttcccg

SEQ ID NO: 23400 - DNA, 19 bp, Homo sapiens
cctagcggcgcaccttccc

SEQ ID NO: 23401 - DNA, 19 bp, Homo sapiens
ccctagcggcgcaccttcc

SEQ ID NO: 23402 - DNA, 19 bp, Homo sapiens
cccctagcggcgcaccttc

SEQ ID NO: 23403 - DNA, 19 bp, Homo sapiens
acccctagcggcgcacctt

SEQ ID NO: 23404 - DNA, 19 bp, Homo sapiens
gacccctagcggcgcacct

SEQ ID NO: 23405 - DNA, 19 bp, Homo sapiens
ggacccctagcggcgcacc

SEQ ID NO: 23406 - DNA, 19 bp, Homo sapiens
tggacccctagcggcgcac

SEQ ID NO: 23407 - DNA, 19 bp, Homo sapiens
gtggacccctagcggcgca

SEQ ID NO: 23408 - DNA, 19 bp, Homo sapiens
ggtggacccctagcggcgc

SEQ ID NO: 23409 - DNA, 19 bp, Homo sapiens
aggtggacccctagcggcg

SEQ ID NO: 23410 - DNA, 19 bp, Homo sapiens
caggtggacccctagcggc

SEQ ID NO: 23411 - DNA, 19 bp, Homo sapiens
gcaggtggacccctagcgg

SEQ ID NO: 23412 - DNA, 19 bp, Homo sapiens
ggcaggtggacccctagcg

SEQ ID NO: 23413 - DNA, 19 bp, Homo sapiens
aggcaggtggacccctagc

SEQ ID NO: 23414 - DNA, 19 bp, Homo sapiens
aaggcaggtggacccctag

SEQ ID NO: 23415 - DNA, 19 bp, Homo sapiens
aaaggcaggtggaccccta

SEQ ID NO: 23416 - DNA, 19 bp, Homo sapiens
aaaaggcaggtggacccct

SEQ ID NO: 23417 - DNA, 19 bp, Homo sapiens
caaaaggcaggtggacccc

SEQ ID NO: 23418 - DNA, 19 bp, Homo sapiens
acaaaaggcaggtggaccc

SEQ ID NO: 23419 - DNA, 19 bp, Homo sapiens
cacaaaaggcaggtggacc

SEQ ID NO: 23420 - DNA, 19 bp, Homo sapiens
ccacaaaaggcaggtggac

SEQ ID NO: 23421 - DNA, 19 bp, Homo sapiens
cccacaaaaggcaggtgga

SEQ ID NO: 23422 - DNA, 19 bp, Homo sapiens
gcccacaaaaggcaggtgg

SEQ ID NO: 23423 - DNA, 19 bp, Homo sapiens
agcccacaaaaggcaggtg

SEQ ID NO: 23424 - DNA, 19 bp, Homo sapiens
tagcccacaaaaggcaggt

SEQ ID NO: 23425 - DNA, 19 bp, Homo sapiens
gtagcccacaaaaggcagg

SEQ ID NO: 23426 - DNA, 19 bp, Homo sapiens
agtagcccacaaaaggcag

SEQ ID NO: 23427 - DNA, 19 bp, Homo sapiens
gagtagcccacaaaaggca

SEQ ID NO: 23428 - DNA, 19 bp, Homo sapiens
ggagtagcccacaaaaggc

SEQ ID NO: 23429 - DNA, 19 bp, Homo sapiens
aggagtagcccacaaaagg

SEQ ID NO: 23430 - DNA, 19 bp, Homo sapiens
taggagtagcccacaaaag

SEQ ID NO: 23431 - DNA, 19 bp, Homo sapiens
gtaggagtagcccacaaaa

SEQ ID NO: 23432 - DNA, 19 bp, Homo sapiens
agtaggagtagcccacaaa

SEQ ID NO: 23433 - DNA, 19 bp, Homo sapiens
gagtaggagtagcccacaa

SEQ ID NO: 23434 - DNA, 19 bp, Homo sapiens
ggagtaggagtagcccaca

SEQ ID NO: 23435 - DNA, 19 bp, Homo sapiens
aggagtaggagtagcccac

SEQ ID NO: 23436 - DNA, 19 bp, Homo sapiens
caggagtaggagtagccca

SEQ ID NO: 23437 - DNA, 19 bp, Homo sapiens
gcaggagtaggagtagccc

SEQ ID NO: 23438 - DNA, 19 bp, Homo sapiens
tgcaggagtaggagtagcc

SEQ ID NO: 23439 - DNA, 19 bp, Homo sapiens
atgcaggagtaggagtagc

SEQ ID NO: 23440 - DNA, 19 bp, Homo sapiens
catgcaggagtaggagtag

SEQ ID NO: 23441 - DNA, 19 bp, Homo sapiens
ccatgcaggagtaggagta

SEQ ID NO: 23442 - DNA, 19 bp, Homo sapiens
gccatgcaggagtaggagt

SEQ ID NO: 23443 - DNA, 19 bp, Homo sapiens
ggccatgcaggagtaggag

SEQ ID NO: 23444 - DNA, 19 bp, Homo sapiens
gggccatgcaggagtagga

SEQ ID NO: 23445 - DNA, 19 bp, Homo sapiens
agggccatgcaggagtagg

SEQ ID NO: 23446 - DNA, 19 bp, Homo sapiens
gagggccatgcaggagtag

SEQ ID NO: 23447 - DNA, 19 bp, Homo sapiens
tgagggccatgcaggagta

SEQ ID NO: 23448 - DNA, 19 bp, Homo sapiens
ctgagggccatgcaggagt

SEQ ID NO: 23449 - DNA, 19 bp, Homo sapiens
cctgagggccatgcaggag

SEQ ID NO: 23450 - DNA, 19 bp, Homo sapiens
ccctgagggccatgcagga

SEQ ID NO: 23451 - DNA, 19 bp, Homo sapiens
tccctgagggccatgcagg

SEQ ID NO: 23452 - DNA, 19 bp, Homo sapiens
gtccctgagggccatgcag

SEQ ID NO: 23453 - DNA, 19 bp, Homo sapiens
tgtccctgagggccatgca

SEQ ID NO: 23454 - DNA, 19 bp, Homo sapiens
ctgtccctgagggccatgc

SEQ ID NO: 23455 - DNA, 19 bp, Homo sapiens
actgtccctgagggccatg

SEQ ID NO: 23456 - DNA, 19 bp, Homo sapiens
cactgtccctgagggccat

SEQ ID NO: 23457 - DNA, 19 bp, Homo sapiens
tcactgtccctgagggcca

SEQ ID NO: 23458 - DNA, 19 bp, Homo sapiens
ctcactgtccctgagggcc

SEQ ID NO: 23459 - DNA, 19 bp, Homo sapiens
cctcactgtccctgagggc

SEQ ID NO: 23460 - DNA, 19 bp, Homo sapiens
acctcactgtccctgaggg

SEQ ID NO: 23461 - DNA, 19 bp, Homo sapiens
gacctcactgtccctgagg

SEQ ID NO: 23462 - DNA, 19 bp, Homo sapiens
ggacctcactgtccctgag

SEQ ID NO: 23463 - DNA, 19 bp, Homo sapiens
gggacctcactgtccctga

SEQ ID NO: 23464 - DNA, 19 bp, Homo sapiens
tgggacctcactgtccctg

SEQ ID NO: 23465 - DNA, 19 bp, Homo sapiens
ctgggacctcactgtccct

SEQ ID NO: 23466 - DNA, 19 bp, Homo sapiens
cctgggacctcactgtccc

SEQ ID NO: 23467 - DNA, 19 bp, Homo sapiens
gcctgggacctcactgtcc

SEQ ID NO: 23468 - DNA, 19 bp, Homo sapiens
ggcctgggacctcactgtc

SEQ ID NO: 23469 - DNA, 19 bp, Homo sapiens
gggcctgggacctcactgt

SEQ ID NO: 23470 - DNA, 19 bp, Homo sapiens
ggggcctgggacctcactg

SEQ ID NO: 23471 - DNA, 19 bp, Homo sapiens
tggggcctgggacctcact

SEQ ID NO: 23472 - DNA, 19 bp, Homo sapiens
gtggggcctgggacctcac

SEQ ID NO: 23473 - DNA, 19 bp, Homo sapiens
tgtggggcctgggacctca

SEQ ID NO: 23474 - DNA, 19 bp, Homo sapiens
gtgtggggcctgggacctc

SEQ ID NO: 23475 - DNA, 19 bp, Homo sapiens
ggtgtggggcctgggacct

SEQ ID NO: 23476 - DNA, 19 bp, Homo sapiens
gggtgtggggcctgggacc

SEQ ID NO: 23477 - DNA, 19 bp, Homo sapiens
tgggtgtggggcctgggac

SEQ ID NO: 23478 - DNA, 19 bp, Homo sapiens
atgggtgtggggcctggga

SEQ ID NO: 23479 - DNA, 19 bp, Homo sapiens
catgggtgtggggcctggg

SEQ ID NO: 23480 - DNA, 19 bp, Homo sapiens
ccatgggtgtggggcctgg

SEQ ID NO: 23481 - DNA, 19 bp, Homo sapiens
tccatgggtgtggggcctg

SEQ ID NO: 23482 - DNA, 19 bp, Homo sapiens
ttccatgggtgtggggcct

SEQ ID NO: 23483 - DNA, 19 bp, Homo sapiens
gttccatgggtgtggggcc

SEQ ID NO: 23484 - DNA, 19 bp, Homo sapiens
agttccatgggtgtggggc

SEQ ID NO: 23485 - DNA, 19 bp, Homo sapiens
cagttccatgggtgtgggg

SEQ ID NO: 23486 - DNA, 19 bp, Homo sapiens
ccagttccatgggtgtggg

SEQ ID NO: 23487 - DNA, 19 bp, Homo sapiens
tccagttccatgggtgtgg

SEQ ID NO: 23488 - DNA, 19 bp, Homo sapiens
ctccagttccatgggtgtg

SEQ ID NO: 23489 - DNA, 19 bp, Homo sapiens
cctccagttccatgggtgt

SEQ ID NO: 23490 - DNA, 19 bp, Homo sapiens
gcctccagttccatgggtg

SEQ ID NO: 23491 - DNA, 19 bp, Homo sapiens
ggcctccagttccatgggt

SEQ ID NO: 23492 - DNA, 19 bp, Homo sapiens
cggcctccagttccatggg

SEQ ID NO: 23493 - DNA, 19 bp, Homo sapiens
tcggcctccagttccatgg

SEQ ID NO: 23494 - DNA, 19 bp, Homo sapiens
ctcggcctccagttccatg

SEQ ID NO: 23495 - DNA, 19 bp, Homo sapiens
gctcggcctccagttccat

SEQ ID NO: 23496 - DNA, 19 bp, Homo sapiens
tgctcggcctccagttcca

SEQ ID NO: 23497 - DNA, 19 bp, Homo sapiens
ctgctcggcctccagttcc

SEQ ID NO: 23498 - DNA, 19 bp, Homo sapiens
gctgctcggcctccagttc

SEQ ID NO: 23499 - DNA, 19 bp, Homo sapiens
agctgctcggcctccagtt

SEQ ID NO: 23500 - DNA, 19 bp, Homo sapiens
cagctgctcggcctccagt

SEQ ID NO: 23501 - DNA, 19 bp, Homo sapiens
gcagctgctcggcctccag

SEQ ID NO: 23502 - DNA, 19 bp, Homo sapiens
agcagctgctcggcctcca

SEQ ID NO: 23503 - DNA, 19 bp, Homo sapiens
aagcagctgctcggcctcc

SEQ ID NO: 23504 - DNA, 19 bp, Homo sapiens
caagcagctgctcggcctc

SEQ ID NO: 23505 - DNA, 19 bp, Homo sapiens
tcaagcagctgctcggcct

SEQ ID NO: 23506 - DNA, 19 bp, Homo sapiens
ctcaagcagctgctcggcc

SEQ ID NO: 23507 - DNA, 19 bp, Homo sapiens
gctcaagcagctgctcggc

SEQ ID NO: 23508 - DNA, 19 bp, Homo sapiens
ggctcaagcagctgctcgg

SEQ ID NO: 23509 - DNA, 19 bp, Homo sapiens
tggctcaagcagctgctcg

SEQ ID NO: 23510 - DNA, 19 bp, Homo sapiens
gtggctcaagcagctgctc

SEQ ID NO: 23511 - DNA, 19 bp, Homo sapiens
tgtggctcaagcagctgct

SEQ ID NO: 23512 - DNA, 19 bp, Homo sapiens
gtgtggctcaagcagctgc

SEQ ID NO: 23513 - DNA, 19 bp, Homo sapiens
cgtgtggctcaagcagctg

SEQ ID NO: 23514 - DNA, 19 bp, Homo sapiens
acgtgtggctcaagcagct

SEQ ID NO: 23515 - DNA, 19 bp, Homo sapiens
cacgtgtggctcaagcagc

SEQ ID NO: 23516 - DNA, 19 bp, Homo sapiens
gcacgtgtggctcaagcag

SEQ ID NO: 23517 - DNA, 19 bp, Homo sapiens
tgcacgtgtggctcaagca

SEQ ID NO: 23518 - DNA, 19 bp, Homo sapiens
ttgcacgtgtggctcaagc

SEQ ID NO: 23519 - DNA, 19 bp, Homo sapiens
cttgcacgtgtggctcaag

SEQ ID NO: 23520 - DNA, 19 bp, Homo sapiens
gcttgcacgtgtggctcaa

SEQ ID NO: 23521 - DNA, 19 bp, Homo sapiens
cgcttgcacgtgtggctca

SEQ ID NO: 23522 - DNA, 19 bp, Homo sapiens
gcgcttgcacgtgtggctc

SEQ ID NO: 23523 - DNA, 19 bp, Homo sapiens
ggcgcttgcacgtgtggct

SEQ ID NO: 23524 - DNA, 19 bp, Homo sapiens
gggcgcttgcacgtgtggc

SEQ ID NO: 23525 - DNA, 19 bp, Homo sapiens
tgggcgcttgcacgtgtgg

SEQ ID NO: 23526 - DNA, 19 bp, Homo sapiens
ctgggcgcttgcacgtgtg

SEQ ID NO: 23527 - DNA, 19 bp, Homo sapiens
gctgggcgcttgcacgtgt

SEQ ID NO: 23528 - DNA, 19 bp, Homo sapiens
ggctgggcgcttgcacgtg

SEQ ID NO: 23529 - DNA, 19 bp, Homo sapiens
aggctgggcgcttgcacgt

SEQ ID NO: 23530 - DNA, 19 bp, Homo sapiens
caggctgggcgcttgcacg

SEQ ID NO: 23531 - DNA, 19 bp, Homo sapiens
ccaggctgggcgcttgcac

SEQ ID NO: 23532 - DNA, 19 bp, Homo sapiens
tccaggctgggcgcttgca

SEQ ID NO: 23533 - DNA, 19 bp, Homo sapiens
ctccaggctgggcgcttgc

SEQ ID NO: 23534 - DNA, 19 bp, Homo sapiens
gctccaggctgggcgcttg

SEQ ID NO: 23535 - DNA, 19 bp, Homo sapiens
ggctccaggctgggcgctt

SEQ ID NO: 23536 - DNA, 19 bp, Homo sapiens
gggctccaggctgggcgct

SEQ ID NO: 23537 - DNA, 19 bp, Homo sapiens
agggctccaggctgggcgc

SEQ ID NO: 23538 - DNA, 19 bp, Homo sapiens
gagggctccaggctgggcg

SEQ ID NO: 23539 - DNA, 19 bp, Homo sapiens
cgagggctccaggctgggc

SEQ ID NO: 23540 - DNA, 19 bp, Homo sapiens
ccgagggctccaggctggg

SEQ ID NO: 23541 - DNA, 19 bp, Homo sapiens
accgagggctccaggctgg

SEQ ID NO: 23542 - DNA, 19 bp, Homo sapiens
caccgagggctccaggctg

SEQ ID NO: 23543 - DNA, 19 bp, Homo sapiens
acaccgagggctccaggct

SEQ ID NO: 23544 - DNA, 19 bp, Homo sapiens
gacaccgagggctccaggc

SEQ ID NO: 23545 - DNA, 19 bp, Homo sapiens
ggacaccgagggctccagg

SEQ ID NO: 23546 - DNA, 19 bp, Homo sapiens
gggacaccgagggctccag

SEQ ID NO: 23547 - DNA, 19 bp, Homo sapiens
ggggacaccgagggctcca

SEQ ID NO: 23548 - DNA, 19 bp, Homo sapiens
tggggacaccgagggctcc

SEQ ID NO: 23549 - DNA, 19 bp, Homo sapiens
gtggggacaccgagggctc

SEQ ID NO: 23550 - DNA, 19 bp, Homo sapiens
tgtggggacaccgagggct

SEQ ID NO: 23551 - DNA, 19 bp, Homo sapiens
ctgtggggacaccgagggc

SEQ ID NO: 23552 - DNA, 19 bp, Homo sapiens
cctgtggggacaccgaggg

SEQ ID NO: 23553 - DNA, 19 bp, Homo sapiens
tcctgtggggacaccgagg

SEQ ID NO: 23554 - DNA, 19 bp, Homo sapiens
atcctgtggggacaccgag

SEQ ID NO: 23555 - DNA, 19 bp, Homo sapiens
catcctgtggggacaccga

SEQ ID NO: 23556 - DNA, 19 bp, Homo sapiens
tcatcctgtggggacaccg

SEQ ID NO: 23557 - DNA, 19 bp, Homo sapiens
ttcatcctgtggggacacc

SEQ ID NO: 23558 - DNA, 19 bp, Homo sapiens
tttcatcctgtggggacac

SEQ ID NO: 23559 - DNA, 19 bp, Homo sapiens
gtttcatcctgtggggaca

SEQ ID NO: 23560 - DNA, 19 bp, Homo sapiens
tgtttcatcctgtggggac

SEQ ID NO: 23561 - DNA, 19 bp, Homo sapiens
ctgtttcatcctgtgggga

SEQ ID NO: 23562 - DNA, 19 bp, Homo sapiens
gctgtttcatcctgtgggg

SEQ ID NO: 23563 - DNA, 19 bp, Homo sapiens
agctgtttcatcctgtggg

SEQ ID NO: 23564 - DNA, 19 bp, Homo sapiens
cagctgtttcatcctgtgg

SEQ ID NO: 23565 - DNA, 19 bp, Homo sapiens
tcagctgtttcatcctgtg

SEQ ID NO: 23566 - DNA, 19 bp, Homo sapiens
ttcagctgtttcatcctgt

SEQ ID NO: 23567 - DNA, 19 bp, Homo sapiens
cttcagctgtttcatcctg

SEQ ID NO: 23568 - DNA, 19 bp, Homo sapiens
acttcagctgtttcatcct

SEQ ID NO: 23569 - DNA, 19 bp, Homo sapiens
cacttcagctgtttcatcc

SEQ ID NO: 23570 - DNA, 19 bp, Homo sapiens
ccacttcagctgtttcatc

SEQ ID NO: 23571 - DNA, 19 bp, Homo sapiens
gccacttcagctgtttcat

SEQ ID NO: 23572 - DNA, 19 bp, Homo sapiens
tgccacttcagctgtttca

SEQ ID NO: 23573 - DNA, 19 bp, Homo sapiens
ctgccacttcagctgtttc

SEQ ID NO: 23574 - DNA, 19 bp, Homo sapiens
actgccacttcagctgttt

SEQ ID NO: 23575 - DNA, 19 bp, Homo sapiens
aactgccacttcagctgtt

SEQ ID NO: 23576 - DNA, 19 bp, Homo sapiens
gaactgccacttcagctgt

SEQ ID NO: 23577 - DNA, 19 bp, Homo sapiens
ggaactgccacttcagctg

SEQ ID NO: 23578 - DNA, 19 bp, Homo sapiens
tggaactgccacttcagct

SEQ ID NO: 23579 - DNA, 19 bp, Homo sapiens
ctggaactgccacttcagc

SEQ ID NO: 23580 - DNA, 19 bp, Homo sapiens
gctggaactgccacttcag

SEQ ID NO: 23581 - DNA, 19 bp, Homo sapiens
cgctggaactgccacttca

SEQ ID NO: 23582 - DNA, 19 bp, Homo sapiens
ccgctggaactgccacttc

SEQ ID NO: 23583 - DNA, 19 bp, Homo sapiens
gccgctggaactgccactt

SEQ ID NO: 23584 - DNA, 19 bp, Homo sapiens
agccgctggaactgccact

SEQ ID NO: 23585 - DNA, 19 bp, Homo sapiens
cagccgctggaactgccac

SEQ ID NO: 23586 - DNA, 19 bp, Homo sapiens
acagccgctggaactgcca

SEQ ID NO: 23587 - DNA, 19 bp, Homo sapiens
gacagccgctggaactgcc

SEQ ID NO: 23588 - DNA, 19 bp, Homo sapiens
ggacagccgctggaactgc

SEQ ID NO: 23589 - DNA, 19 bp, Homo sapiens
gggacagccgctggaactg

SEQ ID NO: 23590 - DNA, 19 bp, Homo sapiens
agggacagccgctggaact

SEQ ID NO: 23591 - DNA, 19 bp, Homo sapiens
cagggacagccgctggaac

SEQ ID NO: 23592 - DNA, 19 bp, Homo sapiens
gcagggacagccgctggaa

SEQ ID NO: 23593 - DNA, 19 bp, Homo sapiens
cgcagggacagccgctgga

SEQ ID NO: 23594 - DNA, 19 bp, Homo sapiens
ccgcagggacagccgctgg

SEQ ID NO: 23595 - DNA, 19 bp, Homo sapiens
gccgcagggacagccgctg

SEQ ID NO: 23596 - DNA, 19 bp, Homo sapiens
tgccgcagggacagccgct

SEQ ID NO: 23597 - DNA, 19 bp, Homo sapiens
ctgccgcagggacagccgc

SEQ ID NO: 23598 - DNA, 19 bp, Homo sapiens
tctgccgcagggacagccg

SEQ ID NO: 23599 - DNA, 19 bp, Homo sapiens
ctctgccgcagggacagcc

SEQ ID NO: 23600 - DNA, 19 bp, Homo sapiens
cctctgccgcagggacagc

SEQ ID NO: 23601 - DNA, 19 bp, Homo sapiens
gcctctgccgcagggacag

SEQ ID NO: 23602 - DNA, 19 bp, Homo sapiens
agcctctgccgcagggaca

SEQ ID NO: 23603 - DNA, 19 bp, Homo sapiens
cagcctctgccgcagggac

SEQ ID NO: 23604 - DNA, 19 bp, Homo sapiens
tcagcctctgccgcaggga

SEQ ID NO: 23605 - DNA, 19 bp, Homo sapiens
ctcagcctctgccgcaggg

SEQ ID NO: 23606 - DNA, 19 bp, Homo sapiens
cctcagcctctgccgcagg

SEQ ID NO: 23607 - DNA, 19 bp, Homo sapiens
gcctcagcctctgccgcag

SEQ ID NO: 23608 - DNA, 19 bp, Homo sapiens
ggcctcagcctctgccgca

SEQ ID NO: 23609 - DNA, 19 bp, Homo sapiens
cggcctcagcctctgccgc

SEQ ID NO: 23610 - DNA, 19 bp, Homo sapiens
tcggcctcagcctctgccg

SEQ ID NO: 23611 - DNA, 19 bp, Homo sapiens
ctcggcctcagcctctgcc

SEQ ID NO: 23612 - DNA, 19 bp, Homo sapiens
cctcggcctcagcctctgc

SEQ ID NO: 23613 - DNA, 19 bp, Homo sapiens
acctcggcctcagcctctg

SEQ ID NO: 23614 - DNA, 19 bp, Homo sapiens
cacctcggcctcagcctct

SEQ ID NO: 23615 - DNA, 19 bp, Homo sapiens
tcacctcggcctcagcctc

SEQ ID NO: 23616 - DNA, 19 bp, Homo sapiens
gtcacctcggcctcagcct

SEQ ID NO: 23617 - DNA, 19 bp, Homo sapiens
cgtcacctcggcctcagcc

SEQ ID NO: 23618 - DNA, 19 bp, Homo sapiens
gcgtcacctcggcctcagc

SEQ ID NO: 23619 - DNA, 19 bp, Homo sapiens
agcgtcacctcggcctcag

SEQ ID NO: 23620 - DNA, 19 bp, Homo sapiens
cagcgtcacctcggcctca

SEQ ID NO: 23621 - DNA, 19 bp, Homo sapiens
gcagcgtcacctcggcctc

SEQ ID NO: 23622 - DNA, 19 bp, Homo sapiens
cgcagcgtcacctcggcct

SEQ ID NO: 23623 - DNA, 19 bp, Homo sapiens
ccgcagcgtcacctcggcc

SEQ ID NO: 23624 - DNA, 19 bp, Homo sapiens
cccgcagcgtcacctcggc

SEQ ID NO: 23625 - DNA, 19 bp, Homo sapiens
tcccgcagcgtcacctcgg

SEQ ID NO: 23626 - DNA, 19 bp, Homo sapiens
ctcccgcagcgtcacctcg

SEQ ID NO: 23627 - DNA, 19 bp, Homo sapiens
gctcccgcagcgtcacctc

SEQ ID NO: 23628 - DNA, 19 bp, Homo sapiens
agctcccgcagcgtcacct

SEQ ID NO: 23629 - DNA, 19 bp, Homo sapiens
gagctcccgcagcgtcacc

SEQ ID NO: 23630 - DNA, 19 bp, Homo sapiens
ggagctcccgcagcgtcac

SEQ ID NO: 23631 - DNA, 19 bp, Homo sapiens
tggagctcccgcagcgtca

SEQ ID NO: 23632 - DNA, 19 bp, Homo sapiens
ctggagctcccgcagcgtc

SEQ ID NO: 23633 - DNA, 19 bp, Homo sapiens
cctggagctcccgcagcgt

SEQ ID NO: 23634 - DNA, 19 bp, Homo sapiens
tcctggagctcccgcagcg

SEQ ID NO: 23635 - DNA, 19 bp, Homo sapiens
ttcctggagctcccgcagc

SEQ ID NO: 23636 - DNA, 19 bp, Homo sapiens
cttcctggagctcccgcag

SEQ ID NO: 23637 - DNA, 19 bp, Homo sapiens
gcttcctggagctcccgca

SEQ ID NO: 23638 - DNA, 19 bp, Homo sapiens
ggcttcctggagctcccgc

SEQ ID NO: 23639 - DNA, 19 bp, Homo sapiens
gggcttcctggagctcccg

SEQ ID NO: 23640 - DNA, 19 bp, Homo sapiens
agggcttcctggagctccc

SEQ ID NO: 23641 - DNA, 19 bp, Homo sapiens
cagggcttcctggagctcc

SEQ ID NO: 23642 - DNA, 19 bp, Homo sapiens
ccagggcttcctggagctc

SEQ ID NO: 23643 - DNA, 19 bp, Homo sapiens
tccagggcttcctggagct

SEQ ID NO: 23644 - DNA, 19 bp, Homo sapiens
ctccagggcttcctggagc

SEQ ID NO: 23645 - DNA, 19 bp, Homo sapiens
cctccagggcttcctggag

SEQ ID NO: 23646 - DNA, 19 bp, Homo sapiens
tcctccagggcttcctgga

SEQ ID NO: 23647 - DNA, 19 bp, Homo sapiens
ctcctccagggcttcctgg

SEQ ID NO: 23648 - DNA, 19 bp, Homo sapiens
cctcctccagggcttcctg

SEQ ID NO: 23649 - DNA, 19 bp, Homo sapiens
tcctcctccagggcttcct

SEQ ID NO: 23650 - DNA, 19 bp, Homo sapiens
ctcctcctccagggcttcc

SEQ ID NO: 23651 - DNA, 19 bp, Homo sapiens
cctcctcctccagggcttc

SEQ ID NO: 23652 - DNA, 19 bp, Homo sapiens
acctcctcctccagggctt

SEQ ID NO: 23653 - DNA, 19 bp, Homo sapiens
cacctcctcctccagggct

SEQ ID NO: 23654 - DNA, 19 bp, Homo sapiens
gcacctcctcctccagggc

SEQ ID NO: 23655 - DNA, 19 bp, Homo sapiens
agcacctcctcctccaggg

SEQ ID NO: 23656 - DNA, 19 bp, Homo sapiens
gagcacctcctcctccagg

SEQ ID NO: 23657 - DNA, 19 bp, Homo sapiens
tgagcacctcctcctccag

SEQ ID NO: 23658 - DNA, 19 bp, Homo sapiens
gtgagcacctcctcctcca

SEQ ID NO: 23659 - DNA, 19 bp, Homo sapiens
ggtgagcacctcctcctcc

SEQ ID NO: 23660 - DNA, 19 bp, Homo sapiens
gggtgagcacctcctcctc

SEQ ID NO: 23661 - DNA, 19 bp, Homo sapiens
cgggtgagcacctcctcct

SEQ ID NO: 23662 - DNA, 19 bp, Homo sapiens
ccgggtgagcacctcctcc

SEQ ID NO: 23663 - DNA, 19 bp, Homo sapiens
gccgggtgagcacctcctc

SEQ ID NO: 23664 - DNA, 19 bp, Homo sapiens
tgccgggtgagcacctcct

SEQ ID NO: 23665 - DNA, 19 bp, Homo sapiens
ctgccgggtgagcacctcc

SEQ ID NO: 23666 - DNA, 19 bp, Homo sapiens
tctgccgggtgagcacctc

SEQ ID NO: 23667 - DNA, 19 bp, Homo sapiens
ctctgccgggtgagcacct

SEQ ID NO: 23668 - DNA, 19 bp, Homo sapiens
gctctgccgggtgagcacc

SEQ ID NO: 23669 - DNA, 19 bp, Homo sapiens
ggctctgccgggtgagcac

SEQ ID NO: 23670 - DNA, 19 bp, Homo sapiens
aggctctgccgggtgagca

SEQ ID NO: 23671 - DNA, 19 bp, Homo sapiens
caggctctgccgggtgagc

SEQ ID NO: 23672 - DNA, 19 bp, Homo sapiens
tcaggctctgccgggtgag

SEQ ID NO: 23673 - DNA, 19 bp, Homo sapiens
ctcaggctctgccgggtga

SEQ ID NO: 23674 - DNA, 19 bp, Homo sapiens
gctcaggctctgccgggtg

SEQ ID NO: 23675 - DNA, 19 bp, Homo sapiens
ggctcaggctctgccgggt

SEQ ID NO: 23676 - DNA, 19 bp, Homo sapiens
cggctcaggctctgccggg

SEQ ID NO: 23677 - DNA, 19 bp, Homo sapiens
ccggctcaggctctgccgg

SEQ ID NO: 23678 - DNA, 19 bp, Homo sapiens
cccggctcaggctctgccg

SEQ ID NO: 23679 - DNA, 19 bp, Homo sapiens
tcccggctcaggctctgcc

SEQ ID NO: 23680 - DNA, 19 bp, Homo sapiens
ctcccggctcaggctctgc

SEQ ID NO: 23681 - DNA, 19 bp, Homo sapiens
tctcccggctcaggctctg

SEQ ID NO: 23682 - DNA, 19 bp, Homo sapiens
atctcccggctcaggctct

SEQ ID NO: 23683 - DNA, 19 bp, Homo sapiens
catctcccggctcaggctc

SEQ ID NO: 23684 - DNA, 19 bp, Homo sapiens
ccatctcccggctcaggct

SEQ ID NO: 23685 - DNA, 19 bp, Homo sapiens
tccatctcccggctcaggc

SEQ ID NO: 23686 - DNA, 19 bp, Homo sapiens
ctccatctcccggctcagg

SEQ ID NO: 23687 - DNA, 19 bp, Homo sapiens
cctccatctcccggctcag

SEQ ID NO: 23688 - DNA, 19 bp, Homo sapiens
gcctccatctcccggctca

SEQ ID NO: 23689 - DNA, 19 bp, Homo sapiens
ggcctccatctcccggctc

SEQ ID NO: 23690 - DNA, 19 bp, Homo sapiens
tggcctccatctcccggct

SEQ ID NO: 23691 - DNA, 19 bp, Homo sapiens
atggcctccatctcccggc

SEQ ID NO: 23692 - DNA, 19 bp, Homo sapiens
gatggcctccatctcccgg

SEQ ID NO: 23693 - DNA, 19 bp, Homo sapiens
ggatggcctccatctcccg

SEQ ID NO: 23694 - DNA, 19 bp, Homo sapiens
cggatggcctccatctccc

SEQ ID NO: 23695 - DNA, 19 bp, Homo sapiens
gcggatggcctccatctcc

SEQ ID NO: 23696 - DNA, 19 bp, Homo sapiens
tgcggatggcctccatctc

SEQ ID NO: 23697 - DNA, 19 bp, Homo sapiens
gtgcggatggcctccatct

SEQ ID NO: 23698 - DNA, 19 bp, Homo sapiens
cgtgcggatggcctccatc

SEQ ID NO: 23699 - DNA, 19 bp, Homo sapiens
ccgtgcggatggcctccat

SEQ ID NO: 23700 - DNA, 19 bp, Homo sapiens
tccgtgcggatggcctcca

SEQ ID NO: 23701 - DNA, 19 bp, Homo sapiens
gtccgtgcggatggcctcc

SEQ ID NO: 23702 - DNA, 19 bp, Homo sapiens
tgtccgtgcggatggcctc

SEQ ID NO: 23703 - DNA, 19 bp, Homo sapiens
ttgtccgtgcggatggcct

SEQ ID NO: 23704 - DNA, 19 bp, Homo sapiens
gttgtccgtgcggatggcc

SEQ ID NO: 23705 - DNA, 19 bp, Homo sapiens
ggttgtccgtgcggatggc

SEQ ID NO: 23706 - DNA, 19 bp, Homo sapiens
tggttgtccgtgcggatgg

SEQ ID NO: 23707 - DNA, 19 bp, Homo sapiens
ctggttgtccgtgcggatg

SEQ ID NO: 23708 - DNA, 19 bp, Homo sapiens
tctggttgtccgtgcggat

SEQ ID NO: 23709 - DNA, 19 bp, Homo sapiens
ttctggttgtccgtgcgga

SEQ ID NO: 23710 - DNA, 19 bp, Homo sapiens
gttctggttgtccgtgcgg

SEQ ID NO: 23711 - DNA, 19 bp, Homo sapiens
agttctggttgtccgtgcg

SEQ ID NO: 23712 - DNA, 19 bp, Homo sapiens
aagttctggttgtccgtgc

SEQ ID NO: 23713 - DNA, 19 bp, Homo sapiens
gaagttctggttgtccgtg

SEQ ID NO: 23714 - DNA, 19 bp, Homo sapiens
cgaagttctggttgtccgt

SEQ ID NO: 23715 - DNA, 19 bp, Homo sapiens
gcgaagttctggttgtccg

SEQ ID NO: 23716 - DNA, 19 bp, Homo sapiens
ggcgaagttctggttgtcc

SEQ ID NO: 23717 - DNA, 19 bp, Homo sapiens
tggcgaagttctggttgtc

SEQ ID NO: 23718 - DNA, 19 bp, Homo sapiens
ctggcgaagttctggttgt

SEQ ID NO: 23719 - DNA, 19 bp, Homo sapiens
actggcgaagttctggttg

SEQ ID NO: 23720 - DNA, 19 bp, Homo sapiens
gactggcgaagttctggtt

SEQ ID NO: 23721 - DNA, 19 bp, Homo sapiens
tgactggcgaagttctggt

SEQ ID NO: 23722 - DNA, 19 bp, Homo sapiens
ttgactggcgaagttctgg

SEQ ID NO: 23723 - DNA, 19 bp, Homo sapiens
gttgactggcgaagttctg

SEQ ID NO: 23724 - DNA, 19 bp, Homo sapiens
agttgactggcgaagttct

SEQ ID NO: 23725 - DNA, 19 bp, Homo sapiens
tagttgactggcgaagttc

SEQ ID NO: 23726 - DNA, 19 bp, Homo sapiens
gtagttgactggcgaagtt

SEQ ID NO: 23727 - DNA, 19 bp, Homo sapiens
cgtagttgactggcgaagt

SEQ ID NO: 23728 - DNA, 19 bp, Homo sapiens
gcgtagttgactggcgaag

SEQ ID NO: 23729 - DNA, 19 bp, Homo sapiens
cgcgtagttgactggcgaa

SEQ ID NO: 23730 - DNA, 19 bp, Homo sapiens
tcgcgtagttgactggcga

SEQ ID NO: 23731 - DNA, 19 bp, Homo sapiens
ctcgcgtagttgactggcg

SEQ ID NO: 23732 - DNA, 19 bp, Homo sapiens
cctcgcgtagttgactggc

SEQ ID NO: 23733 - DNA, 19 bp, Homo sapiens
gcctcgcgtagttgactgg

SEQ ID NO: 23734 - DNA, 19 bp, Homo sapiens
tgcctcgcgtagttgactg

SEQ ID NO: 23735 - DNA, 19 bp, Homo sapiens
ctgcctcgcgtagttgact

SEQ ID NO: 23736 - DNA, 19 bp, Homo sapiens
tctgcctcgcgtagttgac

SEQ ID NO: 23737 - DNA, 19 bp, Homo sapiens
ctctgcctcgcgtagttga

SEQ ID NO: 23738 - DNA, 19 bp, Homo sapiens
cctctgcctcgcgtagttg

SEQ ID NO: 23739 - DNA, 19 bp, Homo sapiens
gcctctgcctcgcgtagtt

SEQ ID NO: 23740 - DNA, 19 bp, Homo sapiens
agcctctgcctcgcgtagt

SEQ ID NO: 23741 - DNA, 19 bp, Homo sapiens
gagcctctgcctcgcgtag

SEQ ID NO: 23742 - DNA, 19 bp, Homo sapiens
cgagcctctgcctcgcgta

SEQ ID NO: 23743 - DNA, 19 bp, Homo sapiens
ccgagcctctgcctcgcgt

SEQ ID NO: 23744 - DNA, 19 bp, Homo sapiens
tccgagcctctgcctcgcg

SEQ ID NO: 23745 - DNA, 19 bp, Homo sapiens
ttccgagcctctgcctcgc

SEQ ID NO: 23746 - DNA, 19 bp, Homo sapiens
gttccgagcctctgcctcg

SEQ ID NO: 23747 - DNA, 19 bp, Homo sapiens
ggttccgagcctctgcctc

SEQ ID NO: 23748 - DNA, 19 bp, Homo sapiens
cggttccgagcctctgcct

SEQ ID NO: 23749 - DNA, 19 bp, Homo sapiens
ccggttccgagcctctgcc

SEQ ID NO: 23750 - DNA, 19 bp, Homo sapiens
cccggttccgagcctctgc

SEQ ID NO: 23751 - DNA, 19 bp, Homo sapiens
tcccggttccgagcctctg

SEQ ID NO: 23752 - DNA, 19 bp, Homo sapiens
gtcccggttccgagcctct

SEQ ID NO: 23753 - DNA, 19 bp, Homo sapiens
ggtcccggttccgagcctc

SEQ ID NO: 23754 - DNA, 19 bp, Homo sapiens
aggtcccggttccgagcct

SEQ ID NO: 23755 - DNA, 19 bp, Homo sapiens
taggtcccggttccgagcc

SEQ ID NO: 23756 - DNA, 19 bp, Homo sapiens
ctaggtcccggttccgagc

SEQ ID NO: 23757 - DNA, 19 bp, Homo sapiens
tctaggtcccggttccgag

SEQ ID NO: 23758 - DNA, 19 bp, Homo sapiens
ctctaggtcccggttccga

SEQ ID NO: 23759 - DNA, 19 bp, Homo sapiens
cctctaggtcccggttccg

SEQ ID NO: 23760 - DNA, 19 bp, Homo sapiens
gcctctaggtcccggttcc

SEQ ID NO: 23761 - DNA, 19 bp, Homo sapiens
tgcctctaggtcccggttc

SEQ ID NO: 23762 - DNA, 19 bp, Homo sapiens
gtgcctctaggtcccggtt

SEQ ID NO: 23763 - DNA, 19 bp, Homo sapiens
tgtgcctctaggtcccggt

SEQ ID NO: 23764 - DNA, 19 bp, Homo sapiens
gtgtgcctctaggtcccgg

SEQ ID NO: 23765 - DNA, 19 bp, Homo sapiens
cgtgtgcctctaggtcccg

SEQ ID NO: 23766 - DNA, 19 bp, Homo sapiens
acgtgtgcctctaggtccc

SEQ ID NO: 23767 - DNA, 19 bp, Homo sapiens
gacgtgtgcctctaggtcc

SEQ ID NO: 23768 - DNA, 19 bp, Homo sapiens
ggacgtgtgcctctaggtc

SEQ ID NO: 23769 - DNA, 19 bp, Homo sapiens
cggacgtgtgcctctaggt

SEQ ID NO: 23770 - DNA, 19 bp, Homo sapiens
ccggacgtgtgcctctagg

SEQ ID NO: 23771 - DNA, 19 bp, Homo sapiens
gccggacgtgtgcctctag

SEQ ID NO: 23772 - DNA, 19 bp, Homo sapiens
tgccggacgtgtgcctcta

SEQ ID NO: 23773 - DNA, 19 bp, Homo sapiens
ctgccggacgtgtgcctct

SEQ ID NO: 23774 - DNA, 19 bp, Homo sapiens
actgccggacgtgtgcctc

SEQ ID NO: 23775 - DNA, 19 bp, Homo sapiens
aactgccggacgtgtgcct

SEQ ID NO: 23776 - DNA, 19 bp, Homo sapiens
caactgccggacgtgtgcc

SEQ ID NO: 23777 - DNA, 19 bp, Homo sapiens
gcaactgccggacgtgtgc

SEQ ID NO: 23778 - DNA, 19 bp, Homo sapiens
tgcaactgccggacgtgtg

SEQ ID NO: 23779 - DNA, 19 bp, Homo sapiens
ctgcaactgccggacgtgt

SEQ ID NO: 23780 - DNA, 19 bp, Homo sapiens
cctgcaactgccggacgtg

SEQ ID NO: 23781 - DNA, 19 bp, Homo sapiens
tcctgcaactgccggacgt

SEQ ID NO: 23782 - DNA, 19 bp, Homo sapiens
ctcctgcaactgccggacg

SEQ ID NO: 23783 - DNA, 19 bp, Homo sapiens
gctcctgcaactgccggac

SEQ ID NO: 23784 - DNA, 19 bp, Homo sapiens
cgctcctgcaactgccgga

SEQ ID NO: 23785 - DNA, 19 bp, Homo sapiens
ccgctcctgcaactgccgg

SEQ ID NO: 23786 - DNA, 19 bp, Homo sapiens
tccgctcctgcaactgccg

SEQ ID NO: 23787 - DNA, 19 bp, Homo sapiens
atccgctcctgcaactgcc

SEQ ID NO: 23788 - DNA, 19 bp, Homo sapiens
catccgctcctgcaactgc

SEQ ID NO: 23789 - DNA, 19 bp, Homo sapiens
ccatccgctcctgcaactg

SEQ ID NO: 23790 - DNA, 19 bp, Homo sapiens
tccatccgctcctgcaact

SEQ ID NO: 23791 - DNA, 19 bp, Homo sapiens
ctccatccgctcctgcaac

SEQ ID NO: 23792 - DNA, 19 bp, Homo sapiens
actccatccgctcctgcaa

SEQ ID NO: 23793 - DNA, 19 bp, Homo sapiens
aactccatccgctcctgca

SEQ ID NO: 23794 - DNA, 19 bp, Homo sapiens
caactccatccgctcctgc

SEQ ID NO: 23795 - DNA, 19 bp, Homo sapiens
gcaactccatccgctcctg

SEQ ID NO: 23796 - DNA, 19 bp, Homo sapiens
agcaactccatccgctcct

SEQ ID NO: 23797 - DNA, 19 bp, Homo sapiens
cagcaactccatccgctcc

SEQ ID NO: 23798 - DNA, 19 bp, Homo sapiens
gcagcaactccatccgctc

SEQ ID NO: 23799 - DNA, 19 bp, Homo sapiens
tgcagcaactccatccgct

SEQ ID NO: 23800 - DNA, 19 bp, Homo sapiens
ctgcagcaactccatccgc

SEQ ID NO: 23801 - DNA, 19 bp, Homo sapiens
cctgcagcaactccatccg

SEQ ID NO: 23802 - DNA, 19 bp, Homo sapiens
gcctgcagcaactccatcc

SEQ ID NO: 23803 - DNA, 19 bp, Homo sapiens
tgcctgcagcaactccatc

SEQ ID NO: 23804 - DNA, 19 bp, Homo sapiens
ctgcctgcagcaactccat

SEQ ID NO: 23805 - DNA, 19 bp, Homo sapiens
tctgcctgcagcaactcca

SEQ ID NO: 23806 - DNA, 19 bp, Homo sapiens
ctctgcctgcagcaactcc

SEQ ID NO: 23807 - DNA, 19 bp, Homo sapiens
cctctgcctgcagcaactc

SEQ ID NO: 23808 - DNA, 19 bp, Homo sapiens
ccctctgcctgcagcaact

SEQ ID NO: 23809 - DNA, 19 bp, Homo sapiens
tccctctgcctgcagcaac

SEQ ID NO: 23810 - DNA, 19 bp, Homo sapiens
ctccctctgcctgcagcaa

SEQ ID NO: 23811 - DNA, 19 bp, Homo sapiens
gctccctctgcctgcagca

SEQ ID NO: 23812 - DNA, 19 bp, Homo sapiens
ggctccctctgcctgcagc

SEQ ID NO: 23813 - DNA, 19 bp, Homo sapiens
tggctccctctgcctgcag

SEQ ID NO: 23814 - DNA, 19 bp, Homo sapiens
gtggctccctctgcctgca

SEQ ID NO: 23815 - DNA, 19 bp, Homo sapiens
tgtggctccctctgcctgc

SEQ ID NO: 23816 - DNA, 19 bp, Homo sapiens
ctgtggctccctctgcctg

SEQ ID NO: 23817 - DNA, 19 bp, Homo sapiens
cctgtggctccctctgcct

SEQ ID NO: 23818 - DNA, 19 bp, Homo sapiens
acctgtggctccctctgcc

SEQ ID NO: 23819 - DNA, 19 bp, Homo sapiens
gacctgtggctccctctgc

SEQ ID NO: 23820 - DNA, 19 bp, Homo sapiens
ggacctgtggctccctctg

SEQ ID NO: 23821 - DNA, 19 bp, Homo sapiens
gggacctgtggctccctct

SEQ ID NO: 23822 - DNA, 19 bp, Homo sapiens
agggacctgtggctccctc

SEQ ID NO: 23823 - DNA, 19 bp, Homo sapiens
tagggacctgtggctccct

SEQ ID NO: 23824 - DNA, 19 bp, Homo sapiens
ctagggacctgtggctccc

SEQ ID NO: 23825 - DNA, 19 bp, Homo sapiens
cctagggacctgtggctcc

SEQ ID NO: 23826 - DNA, 19 bp, Homo sapiens
gcctagggacctgtggctc

SEQ ID NO: 23827 - DNA, 19 bp, Homo sapiens
ggcctagggacctgtggct

SEQ ID NO: 23828 - DNA, 19 bp, Homo sapiens
aggcctagggacctgtggc

SEQ ID NO: 23829 - DNA, 19 bp, Homo sapiens
caggcctagggacctgtgg

SEQ ID NO: 23830 - DNA, 19 bp, Homo sapiens
ccaggcctagggacctgtg

SEQ ID NO: 23831 - DNA, 19 bp, Homo sapiens
gccaggcctagggacctgt

SEQ ID NO: 23832 - DNA, 19 bp, Homo sapiens
ggccaggcctagggacctg

SEQ ID NO: 23833 - DNA, 19 bp, Homo sapiens
aggccaggcctagggacct

SEQ ID NO: 23834 - DNA, 19 bp, Homo sapiens
taggccaggcctagggacc

SEQ ID NO: 23835 - DNA, 19 bp, Homo sapiens
ataggccaggcctagggac

SEQ ID NO: 23836 - DNA, 19 bp, Homo sapiens
gataggccaggcctaggga

SEQ ID NO: 23837 - DNA, 19 bp, Homo sapiens
cgataggccaggcctaggg

SEQ ID NO: 23838 - DNA, 19 bp, Homo sapiens
ccgataggccaggcctagg

SEQ ID NO: 23839 - DNA, 19 bp, Homo sapiens
tccgataggccaggcctag

SEQ ID NO: 23840 - DNA, 19 bp, Homo sapiens
ctccgataggccaggccta

SEQ ID NO: 23841 - DNA, 19 bp, Homo sapiens
cctccgataggccaggcct

SEQ ID NO: 23842 - DNA, 19 bp, Homo sapiens
gcctccgataggccaggcc

SEQ ID NO: 23843 - DNA, 19 bp, Homo sapiens
cgcctccgataggccaggc

SEQ ID NO: 23844 - DNA, 19 bp, Homo sapiens
gcgcctccgataggccagg

SEQ ID NO: 23845 - DNA, 19 bp, Homo sapiens
agcgcctccgataggccag

SEQ ID NO: 23846 - DNA, 19 bp, Homo sapiens
aagcgcctccgataggcca

SEQ ID NO: 23847 - DNA, 19 bp, Homo sapiens
aaagcgcctccgataggcc

SEQ ID NO: 23848 - DNA, 19 bp, Homo sapiens
gaaagcgcctccgataggc

SEQ ID NO: 23849 - DNA, 19 bp, Homo sapiens
ggaaagcgcctccgatagg

SEQ ID NO: 23850 - DNA, 19 bp, Homo sapiens
gggaaagcgcctccgatag

SEQ ID NO: 23851 - DNA, 19 bp, Homo sapiens
agggaaagcgcctccgata

SEQ ID NO: 23852 - DNA, 19 bp, Homo sapiens
cagggaaagcgcctccgat

SEQ ID NO: 23853 - DNA, 19 bp, Homo sapiens
gcagggaaagcgcctccga

SEQ ID NO: 23854 - DNA, 19 bp, Homo sapiens
agcagggaaagcgcctccg

SEQ ID NO: 23855 - DNA, 19 bp, Homo sapiens
gagcagggaaagcgcctcc

SEQ ID NO: 23856 - DNA, 19 bp, Homo sapiens
ggagcagggaaagcgcctc

SEQ ID NO: 23857 - DNA, 19 bp, Homo sapiens
aggagcagggaaagcgcct

SEQ ID NO: 23858 - DNA, 19 bp, Homo sapiens
caggagcagggaaagcgcc

SEQ ID NO: 23859 - DNA, 19 bp, Homo sapiens
acaggagcagggaaagcgc

SEQ ID NO: 23860 - DNA, 19 bp, Homo sapiens
aacaggagcagggaaagcg

SEQ ID NO: 23861 - DNA, 19 bp, Homo sapiens
gaacaggagcagggaaagc

SEQ ID NO: 23862 - DNA, 19 bp, Homo sapiens
cgaacaggagcagggaaag

SEQ ID NO: 23863 - DNA, 19 bp, Homo sapiens
gcgaacaggagcagggaaa

SEQ ID NO: 23864 - DNA, 19 bp, Homo sapiens
ggcgaacaggagcagggaa

SEQ ID NO: 23865 - DNA, 19 bp, Homo sapiens
cggcgaacaggagcaggga

SEQ ID NO: 23866 - DNA, 19 bp, Homo sapiens
acggcgaacaggagcaggg

SEQ ID NO: 23867 - DNA, 19 bp, Homo sapiens
aacggcgaacaggagcagg

SEQ ID NO: 23868 - DNA, 19 bp, Homo sapiens
caacggcgaacaggagcag

SEQ ID NO: 23869 - DNA, 19 bp, Homo sapiens
acaacggcgaacaggagca

SEQ ID NO: 23870 - DNA, 19 bp, Homo sapiens
aacaacggcgaacaggagc

SEQ ID NO: 23871 - DNA, 19 bp, Homo sapiens
gaacaacggcgaacaggag

SEQ ID NO: 23872 - DNA, 19 bp, Homo sapiens
agaacaacggcgaacagga

SEQ ID NO: 23873 - DNA, 19 bp, Homo sapiens
cagaacaacggcgaacagg

SEQ ID NO: 23874 - DNA, 19 bp, Homo sapiens
acagaacaacggcgaacag

SEQ ID NO: 23875 - DNA, 19 bp, Homo sapiens
gacagaacaacggcgaaca

SEQ ID NO: 23876 - DNA, 19 bp, Homo sapiens
agacagaacaacggcgaac

SEQ ID NO: 23877 - DNA, 19 bp, Homo sapiens
gagacagaacaacggcgaa

SEQ ID NO: 23878 - DNA, 19 bp, Homo sapiens
cgagacagaacaacggcga

SEQ ID NO: 23879 - DNA, 19 bp, Homo sapiens
acgagacagaacaacggcg

SEQ ID NO: 23880 - DNA, 19 bp, Homo sapiens
cacgagacagaacaacggc

SEQ ID NO: 23881 - DNA, 19 bp, Homo sapiens
gcacgagacagaacaacgg

SEQ ID NO: 23882 - DNA, 19 bp, Homo sapiens
ggcacgagacagaacaacg

SEQ ID NO: 23883 - DNA, 19 bp, Homo sapiens
cggcacgagacagaacaac

SEQ ID NO: 23884 - DNA, 19 bp, Homo sapiens
gcggcacgagacagaacaa

SEQ ID NO: 23885 - DNA, 19 bp, Homo sapiens
ggcggcacgagacagaaca

SEQ ID NO: 23886 - DNA, 19 bp, Homo sapiens
cggcggcacgagacagaac

SEQ ID NO: 23887 - DNA, 19 bp, Homo sapiens
gcggcggcacgagacagaa

SEQ ID NO: 23888 - DNA, 19 bp, Homo sapiens
ggcggcggcacgagacaga

SEQ ID NO: 23889 - DNA, 19 bp, Homo sapiens
gggcggcggcacgagacag

SEQ ID NO: 23890 - DNA, 19 bp, Homo sapiens
agggcggcggcacgagaca

SEQ ID NO: 23891 - DNA, 19 bp, Homo sapiens
cagggcggcggcacgagac

SEQ ID NO: 23892 - DNA, 19 bp, Homo sapiens
ccagggcggcggcacgaga

SEQ ID NO: 23893 - DNA, 19 bp, Homo sapiens
cccagggcggcggcacgag

SEQ ID NO: 23894 - DNA, 19 bp, Homo sapiens
gcccagggcggcggcacga

SEQ ID NO: 23895 - DNA, 19 bp, Homo sapiens
agcccagggcggcggcacg

SEQ ID NO: 23896 - DNA, 19 bp, Homo sapiens
cagcccagggcggcggcac

SEQ ID NO: 23897 - DNA, 19 bp, Homo sapiens
gcagcccagggcggcggca

SEQ ID NO: 23898 - DNA, 19 bp, Homo sapiens
tgcagcccagggcggcggc

SEQ ID NO: 23899 - DNA, 19 bp, Homo sapiens
atgcagcccagggcggcgg

SEQ ID NO: 23900 - DNA, 19 bp, Homo sapiens
aatgcagcccagggcggcg

SEQ ID NO: 23901 - DNA, 19 bp, Homo sapiens
caatgcagcccagggcggc

SEQ ID NO: 23902 - DNA, 19 bp, Homo sapiens
ccaatgcagcccagggcgg

SEQ ID NO: 23903 - DNA, 19 bp, Homo sapiens
cccaatgcagcccagggcg

SEQ ID NO: 23904 - DNA, 19 bp, Homo sapiens
acccaatgcagcccagggc

SEQ ID NO: 23905 - DNA, 19 bp, Homo sapiens
aacccaatgcagcccaggg

SEQ ID NO: 23906 - DNA, 19 bp, Homo sapiens
caacccaatgcagcccagg

SEQ ID NO: 23907 - DNA, 19 bp, Homo sapiens
ccaacccaatgcagcccag

SEQ ID NO: 23908 - DNA, 19 bp, Homo sapiens
accaacccaatgcagccca

SEQ ID NO: 23909 - DNA, 19 bp, Homo sapiens
caccaacccaatgcagccc

SEQ ID NO: 23910 - DNA, 19 bp, Homo sapiens
ccaccaacccaatgcagcc

SEQ ID NO: 23911 - DNA, 19 bp, Homo sapiens
gccaccaacccaatgcagc

SEQ ID NO: 23912 - DNA, 19 bp, Homo sapiens
ggccaccaacccaatgcag

SEQ ID NO: 23913 - DNA, 19 bp, Homo sapiens
gggccaccaacccaatgca

SEQ ID NO: 23914 - DNA, 19 bp, Homo sapiens
tgggccaccaacccaatgc

SEQ ID NO: 23915 - DNA, 19 bp, Homo sapiens
gtgggccaccaacccaatg

SEQ ID NO: 23916 - DNA, 19 bp, Homo sapiens
cgtgggccaccaacccaat

SEQ ID NO: 23917 - DNA, 19 bp, Homo sapiens
gcgtgggccaccaacccaa

SEQ ID NO: 23918 - DNA, 19 bp, Homo sapiens
ggcgtgggccaccaaccca

SEQ ID NO: 23919 - DNA, 19 bp, Homo sapiens
cggcgtgggccaccaaccc

SEQ ID NO: 23920 - DNA, 19 bp, Homo sapiens
ccggcgtgggccaccaacc

SEQ ID NO: 23921 - DNA, 19 bp, Homo sapiens
gccggcgtgggccaccaac

SEQ ID NO: 23922 - DNA, 19 bp, Homo sapiens
ggccggcgtgggccaccaa

SEQ ID NO: 23923 - DNA, 19 bp, Homo sapiens
tggccggcgtgggccacca

SEQ ID NO: 23924 - DNA, 19 bp, Homo sapiens
ttggccggcgtgggccacc

SEQ ID NO: 23925 - DNA, 19 bp, Homo sapiens
gttggccggcgtgggccac

SEQ ID NO: 23926 - DNA, 19 bp, Homo sapiens
agttggccggcgtgggcca

SEQ ID NO: 23927 - DNA, 19 bp, Homo sapiens
gagttggccggcgtgggcc

SEQ ID NO: 23928 - DNA, 19 bp, Homo sapiens
tgagttggccggcgtgggc

SEQ ID NO: 23929 - DNA, 19 bp, Homo sapiens
gtgagttggccggcgtggg

SEQ ID NO: 23930 - DNA, 19 bp, Homo sapiens
ggtgagttggccggcgtgg

SEQ ID NO: 23931 - DNA, 19 bp, Homo sapiens
cggtgagttggccggcgtg

SEQ ID NO: 23932 - DNA, 19 bp, Homo sapiens
gcggtgagttggccggcgt

SEQ ID NO: 23933 - DNA, 19 bp, Homo sapiens
tgcggtgagttggccggcg

SEQ ID NO: 23934 - DNA, 19 bp, Homo sapiens
ctgcggtgagttggccggc

SEQ ID NO: 23935 - DNA, 19 bp, Homo sapiens
actgcggtgagttggccgg

SEQ ID NO: 23936 - DNA, 19 bp, Homo sapiens
gactgcggtgagttggccg

SEQ ID NO: 23937 - DNA, 19 bp, Homo sapiens
agactgcggtgagttggcc

SEQ ID NO: 23938 - DNA, 19 bp, Homo sapiens
cagactgcggtgagttggc

SEQ ID NO: 23939 - DNA, 19 bp, Homo sapiens
ccagactgcggtgagttgg

SEQ ID NO: 23940 - DNA, 19 bp, Homo sapiens
gccagactgcggtgagttg

SEQ ID NO: 23941 - DNA, 19 bp, Homo sapiens
cgccagactgcggtgagtt

SEQ ID NO: 23942 - DNA, 19 bp, Homo sapiens
gcgccagactgcggtgagt

SEQ ID NO: 23943 - DNA, 19 bp, Homo sapiens
ggcgccagactgcggtgag

SEQ ID NO: 23944 - DNA, 19 bp, Homo sapiens
cggcgccagactgcggtga

SEQ ID NO: 23945 - DNA, 19 bp, Homo sapiens
gcggcgccagactgcggtg

SEQ ID NO: 23946 - DNA, 19 bp, Homo sapiens
ggcggcgccagactgcggt

SEQ ID NO: 23947 - DNA, 19 bp, Homo sapiens
gggcggcgccagactgcgg

SEQ ID NO: 23948 - DNA, 19 bp, Homo sapiens
tgggcggcgccagactgcg

SEQ ID NO: 23949 - DNA, 19 bp, Homo sapiens
ctgggcggcgccagactgc

SEQ ID NO: 23950 - DNA, 19 bp, Homo sapiens
cctgggcggcgccagactg

SEQ ID NO: 23951 - DNA, 19 bp, Homo sapiens
tcctgggcggcgccagact

SEQ ID NO: 23952 - DNA, 19 bp, Homo sapiens
ctcctgggcggcgccagac

SEQ ID NO: 23953 - DNA, 19 bp, Homo sapiens
gctcctgggcggcgccaga

SEQ ID NO: 23954 - DNA, 19 bp, Homo sapiens
ggctcctgggcggcgccag

SEQ ID NO: 23955 - DNA, 19 bp, Homo sapiens
cggctcctgggcggcgcca

SEQ ID NO: 23956 - DNA, 19 bp, Homo sapiens
gcggctcctgggcggcgcc

SEQ ID NO: 23957 - DNA, 19 bp, Homo sapiens
ggcggctcctgggcggcgc

SEQ ID NO: 23958 - DNA, 19 bp, Homo sapiens
gggcggctcctgggcggcg

SEQ ID NO: 23959 - DNA, 19 bp, Homo sapiens
cgggcggctcctgggcggc

SEQ ID NO: 23960 - DNA, 19 bp, Homo sapiens
gcgggcggctcctgggcgg

SEQ ID NO: 23961 - DNA, 19 bp, Homo sapiens
cgcgggcggctcctgggcg

SEQ ID NO: 23962 - DNA, 19 bp, Homo sapiens
gcgcgggcggctcctgggc

SEQ ID NO: 23963 - DNA, 19 bp, Homo sapiens
agcgcgggcggctcctggg

SEQ ID NO: 23964 - DNA, 19 bp, Homo sapiens
gagcgcgggcggctcctgg

SEQ ID NO: 23965 - DNA, 19 bp, Homo sapiens
ggagcgcgggcggctcctg

SEQ ID NO: 23966 - DNA, 19 bp, Homo sapiens
gggagcgcgggcggctcct

SEQ ID NO: 23967 - DNA, 19 bp, Homo sapiens
agggagcgcgggcggctcc

SEQ ID NO: 23968 - DNA, 19 bp, Homo sapiens
cagggagcgcgggcggctc

SEQ ID NO: 23969 - DNA, 19 bp, Homo sapiens
tcagggagcgcgggcggct

SEQ ID NO: 23970 - DNA, 19 bp, Homo sapiens
ttcagggagcgcgggcggc

SEQ ID NO: 23971 - DNA, 19 bp, Homo sapiens
gttcagggagcgcgggcgg

SEQ ID NO: 23972 - DNA, 19 bp, Homo sapiens
ggttcagggagcgcgggcg

SEQ ID NO: 23973 - DNA, 19 bp, Homo sapiens
gggttcagggagcgcgggc

SEQ ID NO: 23974 - DNA, 19 bp, Homo sapiens
agggttcagggagcgcggg

SEQ ID NO: 23975 - DNA, 19 bp, Homo sapiens
tagggttcagggagcgcgg

SEQ ID NO: 23976 - DNA, 19 bp, Homo sapiens
ctagggttcagggagcgcg

SEQ ID NO: 23977 - DNA, 19 bp, Homo sapiens
tctagggttcagggagcgc

SEQ ID NO: 23978 - DNA, 19 bp, Homo sapiens
ttctagggttcagggagcg

SEQ ID NO: 23979 - DNA, 19 bp, Homo sapiens
gttctagggttcagggagc

SEQ ID NO: 23980 - DNA, 19 bp, Homo sapiens
agttctagggttcagggag

SEQ ID NO: 23981 - DNA, 19 bp, Homo sapiens
cagttctagggttcaggga

SEQ ID NO: 23982 - DNA, 19 bp, Homo sapiens
acagttctagggttcaggg

SEQ ID NO: 23983 - DNA, 19 bp, Homo sapiens
gacagttctagggttcagg

SEQ ID NO: 23984 - DNA, 19 bp, Homo sapiens
agacagttctagggttcag

SEQ ID NO: 23985 - DNA, 19 bp, Homo sapiens
aagacagttctagggttca

SEQ ID NO: 23986 - DNA, 19 bp, Homo sapiens
gaagacagttctagggttc

SEQ ID NO: 23987 - DNA, 19 bp, Homo sapiens
cgaagacagttctagggtt

SEQ ID NO: 23988 - DNA, 19 bp, Homo sapiens
tcgaagacagttctagggt

SEQ ID NO: 23989 - DNA, 19 bp, Homo sapiens
gtcgaagacagttctaggg

SEQ ID NO: 23990 - DNA, 19 bp, Homo sapiens
agtcgaagacagttctagg

SEQ ID NO: 23991 - DNA, 19 bp, Homo sapiens
gagtcgaagacagttctag

SEQ ID NO: 23992 - DNA, 19 bp, Homo sapiens
ggagtcgaagacagttcta

SEQ ID NO: 23993 - DNA, 19 bp, Homo sapiens
cggagtcgaagacagttct

SEQ ID NO: 23994 - DNA, 19 bp, Homo sapiens
ccggagtcgaagacagttc

SEQ ID NO: 23995 - DNA, 19 bp, Homo sapiens
cccggagtcgaagacagtt

SEQ ID NO: 23996 - DNA, 19 bp, Homo sapiens
ccccggagtcgaagacagt

SEQ ID NO: 23997 - DNA, 19 bp, Homo sapiens
gccccggagtcgaagacag

SEQ ID NO: 23998 - DNA, 19 bp, Homo sapiens
ggccccggagtcgaagaca

SEQ ID NO: 23999 - DNA, 19 bp, Homo sapiens
gggccccggagtcgaagac

SEQ ID NO: 24000 - DNA, 19 bp, Homo sapiens
ggggccccggagtcgaaga

SEQ ID NO: 24001 - DNA, 19 bp, Homo sapiens
cggggccccggagtcgaag

SEQ ID NO: 24002 - DNA, 19 bp, Homo sapiens
acggggccccggagtcgaa

SEQ ID NO: 24003 - DNA, 19 bp, Homo sapiens
aacggggccccggagtcga

SEQ ID NO: 24004 - DNA, 19 bp, Homo sapiens
caacggggccccggagtcg

SEQ ID NO: 24005 - DNA, 19 bp, Homo sapiens
ccaacggggccccggagtc

SEQ ID NO: 24006 - DNA, 19 bp, Homo sapiens
tccaacggggccccggagt

SEQ ID NO: 24007 - DNA, 19 bp, Homo sapiens
ttccaacggggccccggag

SEQ ID NO: 24008 - DNA, 19 bp, Homo sapiens
cttccaacggggccccgga

SEQ ID NO: 24009 - DNA, 19 bp, Homo sapiens
tcttccaacggggccccgg

SEQ ID NO: 24010 - DNA, 19 bp, Homo sapiens
gtcttccaacggggccccg

SEQ ID NO: 24011 - DNA, 19 bp, Homo sapiens
agtcttccaacggggcccc

SEQ ID NO: 24012 - DNA, 19 bp, Homo sapiens
cagtcttccaacggggccc

SEQ ID NO: 24013 - DNA, 19 bp, Homo sapiens
tcagtcttccaacggggcc

SEQ ID NO: 24014 - DNA, 19 bp, Homo sapiens
ctcagtcttccaacggggc

SEQ ID NO: 24015 - DNA, 19 bp, Homo sapiens
actcagtcttccaacgggg

SEQ ID NO: 24016 - DNA, 19 bp, Homo sapiens
cactcagtcttccaacggg

SEQ ID NO: 24017 - DNA, 19 bp, Homo sapiens
gcactcagtcttccaacgg

SEQ ID NO: 24018 - DNA, 19 bp, Homo sapiens
ggcactcagtcttccaacg

SEQ ID NO: 24019 - DNA, 19 bp, Homo sapiens
gggcactcagtcttccaac

SEQ ID NO: 24020 - DNA, 19 bp, Homo sapiens
cgggcactcagtcttccaa

SEQ ID NO: 24021 - DNA, 19 bp, Homo sapiens
ccgggcactcagtcttcca

SEQ ID NO: 24022 - DNA, 19 bp, Homo sapiens
cccgggcactcagtcttcc

SEQ ID NO: 24023 - DNA, 19 bp, Homo sapiens
ccccgggcactcagtcttc

SEQ ID NO: 24024 - DNA, 19 bp, Homo sapiens
gccccgggcactcagtctt

SEQ ID NO: 24025 - DNA, 19 bp, Homo sapiens
tgccccgggcactcagtct

SEQ ID NO: 24026 - DNA, 19 bp, Homo sapiens
gtgccccgggcactcagtc

SEQ ID NO: 24027 - DNA, 19 bp, Homo sapiens
cgtgccccgggcactcagt

SEQ ID NO: 24028 - DNA, 19 bp, Homo sapiens
ccgtgccccgggcactcag

SEQ ID NO: 24029 - DNA, 19 bp, Homo sapiens
gccgtgccccgggcactca

SEQ ID NO: 24030 - DNA, 19 bp, Homo sapiens
tgccgtgccccgggcactc

SEQ ID NO: 24031 - DNA, 19 bp, Homo sapiens
gtgccgtgccccgggcact

SEQ ID NO: 24032 - DNA, 19 bp, Homo sapiens
tgtgccgtgccccgggcac

SEQ ID NO: 24033 - DNA, 19 bp, Homo sapiens
ctgtgccgtgccccgggca

SEQ ID NO: 24034 - DNA, 19 bp, Homo sapiens
tctgtgccgtgccccgggc

SEQ ID NO: 24035 - DNA, 19 bp, Homo sapiens
ttctgtgccgtgccccggg

SEQ ID NO: 24036 - DNA, 19 bp, Homo sapiens
cttctgtgccgtgccccgg

SEQ ID NO: 24037 - DNA, 19 bp, Homo sapiens
gcttctgtgccgtgccccg

SEQ ID NO: 24038 - DNA, 19 bp, Homo sapiens
ggcttctgtgccgtgcccc

SEQ ID NO: 24039 - DNA, 19 bp, Homo sapiens
cggcttctgtgccgtgccc

SEQ ID NO: 24040 - DNA, 19 bp, Homo sapiens
gcggcttctgtgccgtgcc

SEQ ID NO: 24041 - DNA, 19 bp, Homo sapiens
cgcggcttctgtgccgtgc

SEQ ID NO: 24042 - DNA, 19 bp, Homo sapiens
gcgcggcttctgtgccgtg

SEQ ID NO: 24043 - DNA, 19 bp, Homo sapiens
ggcgcggcttctgtgccgt

SEQ ID NO: 24044 - DNA, 19 bp, Homo sapiens
gggcgcggcttctgtgccg

SEQ ID NO: 24045 - DNA, 19 bp, Homo sapiens
tgggcgcggcttctgtgcc

SEQ ID NO: 24046 - DNA, 19 bp, Homo sapiens
gtgggcgcggcttctgtgc

SEQ ID NO: 24047 - DNA, 19 bp, Homo sapiens
ggtgggcgcggcttctgtg

SEQ ID NO: 24048 - DNA, 19 bp, Homo sapiens
cggtgggcgcggcttctgt

SEQ ID NO: 24049 - DNA, 19 bp, Homo sapiens
gcggtgggcgcggcttctg

SEQ ID NO: 24050 - DNA, 19 bp, Homo sapiens
ggcggtgggcgcggcttct

SEQ ID NO: 24051 - DNA, 19 bp, Homo sapiens
aggcggtgggcgcggcttc

SEQ ID NO: 24052 - DNA, 19 bp, Homo sapiens
caggcggtgggcgcggctt

SEQ ID NO: 24053 - DNA, 19 bp, Homo sapiens
gcaggcggtgggcgcggct

SEQ ID NO: 24054 - DNA, 19 bp, Homo sapiens
ggcaggcggtgggcgcggc

SEQ ID NO: 24055 - DNA, 19 bp, Homo sapiens
tggcaggcggtgggcgcgg

SEQ ID NO: 24056 - DNA, 19 bp, Homo sapiens
ctggcaggcggtgggcgcg

SEQ ID NO: 24057 - DNA, 19 bp, Homo sapiens
actggcaggcggtgggcgc

SEQ ID NO: 24058 - DNA, 19 bp, Homo sapiens
aactggcaggcggtgggcg

SEQ ID NO: 24059 - DNA, 19 bp, Homo sapiens
gaactggcaggcggtgggc

SEQ ID NO: 24060 - DNA, 19 bp, Homo sapiens
tgaactggcaggcggtggg

SEQ ID NO: 24061 - DNA, 19 bp, Homo sapiens
gtgaactggcaggcggtgg

SEQ ID NO: 24062 - DNA, 19 bp, Homo sapiens
tgtgaactggcaggcggtg

SEQ ID NO: 24063 - DNA, 19 bp, Homo sapiens
ttgtgaactggcaggcggt

SEQ ID NO: 24064 - DNA, 19 bp, Homo sapiens
gttgtgaactggcaggcgg

SEQ ID NO: 24065 - DNA, 19 bp, Homo sapiens
ggttgtgaactggcaggcg

SEQ ID NO: 24066 - DNA, 19 bp, Homo sapiens
cggttgtgaactggcaggc

SEQ ID NO: 24067 - DNA, 19 bp, Homo sapiens
gcggttgtgaactggcagg

SEQ ID NO: 24068 - DNA, 19 bp, Homo sapiens
agcggttgtgaactggcag

SEQ ID NO: 24069 - DNA, 19 bp, Homo sapiens
gagcggttgtgaactggca

SEQ ID NO: 24070 - DNA, 19 bp, Homo sapiens
ggagcggttgtgaactggc

SEQ ID NO: 24071 - DNA, 19 bp, Homo sapiens
cggagcggttgtgaactgg

SEQ ID NO: 24072 - DNA, 19 bp, Homo sapiens
tcggagcggttgtgaactg

SEQ ID NO: 24073 - DNA, 19 bp, Homo sapiens
ctcggagcggttgtgaact

SEQ ID NO: 24074 - DNA, 19 bp, Homo sapiens
gctcggagcggttgtgaac

SEQ ID NO: 24075 - DNA, 19 bp, Homo sapiens
cgctcggagcggttgtgaa

SEQ ID NO: 24076 - DNA, 19 bp, Homo sapiens
acgctcggagcggttgtga

SEQ ID NO: 24077 - DNA, 19 bp, Homo sapiens
cacgctcggagcggttgtg

SEQ ID NO: 24078 - DNA, 19 bp, Homo sapiens
ccacgctcggagcggttgt

SEQ ID NO: 24079 - DNA, 19 bp, Homo sapiens
cccacgctcggagcggttg

SEQ ID NO: 24080 - DNA, 19 bp, Homo sapiens
acccacgctcggagcggtt

SEQ ID NO: 24081 - DNA, 19 bp, Homo sapiens
gacccacgctcggagcggt

SEQ ID NO: 24082 - DNA, 19 bp, Homo sapiens
agacccacgctcggagcgg

SEQ ID NO: 24083 - DNA, 19 bp, Homo sapiens
gagacccacgctcggagcg

SEQ ID NO: 24084 - DNA, 19 bp, Homo sapiens
ggagacccacgctcggagc

SEQ ID NO: 24085 - DNA, 19 bp, Homo sapiens
cggagacccacgctcggag

SEQ ID NO: 24086 - DNA, 19 bp, Homo sapiens
gcggagacccacgctcgga

SEQ ID NO: 24087 - DNA, 19 bp, Homo sapiens
ggcggagacccacgctcgg

SEQ ID NO: 24088 - DNA, 19 bp, Homo sapiens
gggcggagacccacgctcg

SEQ ID NO: 24089 - DNA, 19 bp, Homo sapiens
tgggcggagacccacgctc

SEQ ID NO: 24090 - DNA, 19 bp, Homo sapiens
ctgggcggagacccacgct

SEQ ID NO: 24091 - DNA, 19 bp, Homo sapiens
gctgggcggagacccacgc

SEQ ID NO: 24092 - DNA, 19 bp, Homo sapiens
agctgggcggagacccacg

SEQ ID NO: 24093 - DNA, 19 bp, Homo sapiens
gagctgggcggagacccac

SEQ ID NO: 24094 - DNA, 19 bp, Homo sapiens
ggagctgggcggagaccca

SEQ ID NO: 24095 - DNA, 19 bp, Homo sapiens
tggagctgggcggagaccc

SEQ ID NO: 24096 - DNA, 19 bp, Homo sapiens
ctggagctgggcggagacc

SEQ ID NO: 24097 - DNA, 19 bp, Homo sapiens
actggagctgggcggagac

SEQ ID NO: 24098 - DNA, 19 bp, Homo sapiens
gactggagctgggcggaga

SEQ ID NO: 24099 - DNA, 19 bp, Homo sapiens
ggactggagctgggcggag

SEQ ID NO: 24100 - DNA, 19 bp, Homo sapiens
aggactggagctgggcgga

SEQ ID NO: 24101 - DNA, 19 bp, Homo sapiens
caggactggagctgggcgg

SEQ ID NO: 24102 - DNA, 19 bp, Homo sapiens
acaggactggagctgggcg

SEQ ID NO: 24103 - DNA, 19 bp, Homo sapiens
cacaggactggagctgggc

SEQ ID NO: 24104 - DNA, 19 bp, Homo sapiens
tcacaggactggagctggg

SEQ ID NO: 24105 - DNA, 19 bp, Homo sapiens
atcacaggactggagctgg

SEQ ID NO: 24106 - DNA, 19 bp, Homo sapiens
gatcacaggactggagctg

SEQ ID NO: 24107 - DNA, 19 bp, Homo sapiens
ggatcacaggactggagct

SEQ ID NO: 24108 - DNA, 19 bp, Homo sapiens
cggatcacaggactggagc

SEQ ID NO: 24109 - DNA, 19 bp, Homo sapiens
ccggatcacaggactggag

SEQ ID NO: 24110 - DNA, 19 bp, Homo sapiens
cccggatcacaggactgga

SEQ ID NO: 24111 - DNA, 19 bp, Homo sapiens
gcccggatcacaggactgg

SEQ ID NO: 24112 - DNA, 19 bp, Homo sapiens
ggcccggatcacaggactg

SEQ ID NO: 24113 - DNA, 19 bp, Homo sapiens
gggcccggatcacaggact

SEQ ID NO: 24114 - DNA, 19 bp, Homo sapiens
cgggcccggatcacaggac

SEQ ID NO: 24115 - DNA, 19 bp, Homo sapiens
gcgggcccggatcacagga

SEQ ID NO: 24116 - DNA, 19 bp, Homo sapiens
ggcgggcccggatcacagg

SEQ ID NO: 24117 - DNA, 19 bp, Homo sapiens
gggcgggcccggatcacag

SEQ ID NO: 24118 - DNA, 19 bp, Homo sapiens
ggggcgggcccggatcaca

SEQ ID NO: 24119 - DNA, 19 bp, Homo sapiens
gggggcgggcccggatcac

SEQ ID NO: 24120 - DNA, 19 bp, Homo sapiens
agggggcgggcccggatca

SEQ ID NO: 24121 - DNA, 19 bp, Homo sapiens
tagggggcgggcccggatc

SEQ ID NO: 24122 - DNA, 19 bp, Homo sapiens
ctagggggcgggcccggat

SEQ ID NO: 24123 - DNA, 19 bp, Homo sapiens
gctagggggcgggcccgga

SEQ ID NO: 24124 - DNA, 19 bp, Homo sapiens
cgctagggggcgggcccgg

SEQ ID NO: 24125 - DNA, 19 bp, Homo sapiens
ccgctagggggcgggcccg

SEQ ID NO: 24126 - DNA, 19 bp, Homo sapiens
gccgctagggggcgggccc

SEQ ID NO: 24127 - DNA, 19 bp, Homo sapiens
ggccgctagggggcgggcc

SEQ ID NO: 24128 - DNA, 19 bp, Homo sapiens
cggccgctagggggcgggc

SEQ ID NO: 24129 - DNA, 19 bp, Homo sapiens
ccggccgctagggggcggg

SEQ ID NO: 24130 - DNA, 19 bp, Homo sapiens
cccggccgctagggggcgg

SEQ ID NO: 24131 - DNA, 19 bp, Homo sapiens
ccccggccgctagggggcg

SEQ ID NO: 24132 - DNA, 19 bp, Homo sapiens
tccccggccgctagggggc

SEQ ID NO: 24133 - DNA, 19 bp, Homo sapiens
ctccccggccgctaggggg

SEQ ID NO: 24134 - DNA, 19 bp, Homo sapiens
cctccccggccgctagggg

SEQ ID NO: 24135 - DNA, 19 bp, Homo sapiens
ccctccccggccgctaggg

SEQ ID NO: 24136 - DNA, 19 bp, Homo sapiens
tccctccccggccgctagg

SEQ ID NO: 24137 - DNA, 19 bp, Homo sapiens
ctccctccccggccgctag

SEQ ID NO: 24138 - DNA, 19 bp, Homo sapiens
cctccctccccggccgcta

SEQ ID NO: 24139 - DNA, 19 bp, Homo sapiens
ccctccctccccggccgct

SEQ ID NO: 24140 - DNA, 19 bp, Homo sapiens
cccctccctccccggccgc

SEQ ID NO: 24141 - DNA, 19 bp, Homo sapiens
gcccctccctccccggccg

SEQ ID NO: 24142 - DNA, 19 bp, Homo sapiens
ggcccctccctccccggcc

SEQ ID NO: 24143 - DNA, 19 bp, Homo sapiens
cggcccctccctccccggc

SEQ ID NO: 24144 - DNA, 19 bp, Homo sapiens
ccggcccctccctccccgg

SEQ ID NO: 24145 - DNA, 19 bp, Homo sapiens
cccggcccctccctccccg

SEQ ID NO: 24146 - DNA, 19 bp, Homo sapiens
acccggcccctccctcccc

SEQ ID NO: 24147 - DNA, 19 bp, Homo sapiens
gacccggcccctccctccc

SEQ ID NO: 24148 - DNA, 19 bp, Homo sapiens
ggacccggcccctccctcc

SEQ ID NO: 24149 - DNA, 19 bp, Homo sapiens
cggacccggcccctccctc

SEQ ID NO: 24150 - DNA, 19 bp, Homo sapiens
gcggacccggcccctccct

SEQ ID NO: 24151 - DNA, 19 bp, Homo sapiens
cgcggacccggcccctccc

SEQ ID NO: 24152 - DNA, 19 bp, Homo sapiens
ccgcggacccggcccctcc

SEQ ID NO: 24153 - DNA, 19 bp, Homo sapiens
gccgcggacccggcccctc

SEQ ID NO: 24154 - DNA, 19 bp, Homo sapiens
ggccgcggacccggcccct

SEQ ID NO: 24155 - DNA, 19 bp, Homo sapiens
cggccgcggacccggcccc

SEQ ID NO: 24156 - DNA, 19 bp, Homo sapiens
ccggccgcggacccggccc

SEQ ID NO: 24157 - DNA, 19 bp, Homo sapiens
gccggccgcggacccggcc

SEQ ID NO: 24158 - DNA, 19 bp, Homo sapiens
cgccggccgcggacccggc

SEQ ID NO: 24159 - DNA, 19 bp, Homo sapiens
tcgccggccgcggacccgg

SEQ ID NO: 24160 - DNA, 19 bp, Homo sapiens
ttcgccggccgcggacccg

SEQ ID NO: 24161 - DNA, 19 bp, Homo sapiens
gttcgccggccgcggaccc

SEQ ID NO: 24162 - DNA, 19 bp, Homo sapiens
cgttcgccggccgcggacc

SEQ ID NO: 24163 - DNA, 19 bp, Homo sapiens
ccgttcgccggccgcggac

SEQ ID NO: 24164 - DNA, 19 bp, Homo sapiens
cccgttcgccggccgcgga

SEQ ID NO: 24165 - DNA, 19 bp, Homo sapiens
ccccgttcgccggccgcgg

SEQ ID NO: 24166 - DNA, 19 bp, Homo sapiens
gccccgttcgccggccgcg

SEQ ID NO: 24167 - DNA, 19 bp, Homo sapiens
agccccgttcgccggccgc

SEQ ID NO: 24168 - DNA, 19 bp, Homo sapiens
gagccccgttcgccggccg

SEQ ID NO: 24169 - DNA, 19 bp, Homo sapiens
cgagccccgttcgccggcc

SEQ ID NO: 24170 - DNA, 19 bp, Homo sapiens
tcgagccccgttcgccggc

SEQ ID NO: 24171 - DNA, 19 bp, Homo sapiens
ttcgagccccgttcgccgg

SEQ ID NO: 24172 - DNA, 19 bp, Homo sapiens
cttcgagccccgttcgccg

SEQ ID NO: 24173 - DNA, 19 bp, Homo sapiens
ccttcgagccccgttcgcc

SEQ ID NO: 24174 - DNA, 19 bp, Homo sapiens
cccttcgagccccgttcgc

SEQ ID NO: 24175 - DNA, 19 bp, Homo sapiens
acccttcgagccccgttcg

SEQ ID NO: 24176 - DNA, 19 bp, Homo sapiens
gacccttcgagccccgttc

SEQ ID NO: 24177 - DNA, 19 bp, Homo sapiens
ggacccttcgagccccgtt

SEQ ID NO: 24178 - DNA, 19 bp, Homo sapiens
aggacccttcgagccccgt

SEQ ID NO: 24179 - DNA, 19 bp, Homo sapiens
aaggacccttcgagccccg

SEQ ID NO: 24180 - DNA, 19 bp, Homo sapiens
caaggacccttcgagcccc

SEQ ID NO: 24181 - DNA, 19 bp, Homo sapiens
acaaggacccttcgagccc

SEQ ID NO: 24182 - DNA, 19 bp, Homo sapiens
tacaaggacccttcgagcc

SEQ ID NO: 24183 - DNA, 19 bp, Homo sapiens
ctacaaggacccttcgagc

SEQ ID NO: 24184 - DNA, 19 bp, Homo sapiens
gctacaaggacccttcgag

SEQ ID NO: 24185 - DNA, 19 bp, Homo sapiens
ggctacaaggacccttcga

SEQ ID NO: 24186 - DNA, 19 bp, Homo sapiens
cggctacaaggacccttcg

SEQ ID NO: 24187 - DNA, 19 bp, Homo sapiens
ccggctacaaggacccttc

SEQ ID NO: 24188 - DNA, 19 bp, Homo sapiens
cccggctacaaggaccctt

SEQ ID NO: 24189 - DNA, 19 bp, Homo sapiens
tcccggctacaaggaccct

SEQ ID NO: 24190 - DNA, 19 bp, Homo sapiens
ttcccggctacaaggaccc

SEQ ID NO: 24191 - DNA, 19 bp, Homo sapiens
attcccggctacaaggacc

SEQ ID NO: 24192 - DNA, 19 bp, Homo sapiens
cattcccggctacaaggac

SEQ ID NO: 24193 - DNA, 19 bp, Homo sapiens
gcattcccggctacaagga

SEQ ID NO: 24194 - DNA, 19 bp, Homo sapiens
agcattcccggctacaagg

SEQ ID NO: 24195 - DNA, 19 bp, Homo sapiens
cagcattcccggctacaag

SEQ ID NO: 24196 - DNA, 19 bp, Homo sapiens
gcagcattcccggctacaa

SEQ ID NO: 24197 - DNA, 19 bp, Homo sapiens
agcagcattcccggctaca

SEQ ID NO: 24198 - DNA, 19 bp, Homo sapiens
cagcagcattcccggctac

SEQ ID NO: 24199 - DNA, 19 bp, Homo sapiens
gcagcagcattcccggcta

SEQ ID NO: 24200 - DNA, 19 bp, Homo sapiens
agcagcagcattcccggct

SEQ ID NO: 24201 - DNA, 19 bp, Homo sapiens
cagcagcagcattcccggc

SEQ ID NO: 24202 - DNA, 19 bp, Homo sapiens
gcagcagcagcattcccgg

SEQ ID NO: 24203 - DNA, 19 bp, Homo sapiens
agcagcagcagcattcccg

SEQ ID NO: 24204 - DNA, 19 bp, Homo sapiens
cagcagcagcagcattccc

SEQ ID NO: 24205 - DNA, 19 bp, Homo sapiens
gcagcagcagcagcattcc

SEQ ID NO: 24206 - DNA, 19 bp, Homo sapiens
agcagcagcagcagcattc

SEQ ID NO: 24207 - DNA, 19 bp, Homo sapiens
cagcagcagcagcagcatt

SEQ ID NO: 24208 - DNA, 19 bp, Homo sapiens
gcagcagcagcagcagcat

SEQ ID NO: 24209 - DNA, 19 bp, Homo sapiens
cagcagcagcagcagcagc

SEQ ID NO: 24210 - DNA, 19 bp, Homo sapiens
gcagcagcagcagcagcag

SEQ ID NO: 24211 - DNA, 19 bp, Homo sapiens
ccagcagcagcagcagcag

SEQ ID NO: 24212 - DNA, 19 bp, Homo sapiens
cccagcagcagcagcagca

SEQ ID NO: 24213 - DNA, 19 bp, Homo sapiens
ccccagcagcagcagcagc

SEQ ID NO: 24214 - DNA, 19 bp, Homo sapiens
cccccagcagcagcagcag

SEQ ID NO: 24215 - DNA, 19 bp, Homo sapiens
ccccccagcagcagcagca

SEQ ID NO: 24216 - DNA, 19 bp, Homo sapiens
tccccccagcagcagcagc

SEQ ID NO: 24217 - DNA, 19 bp, Homo sapiens
atccccccagcagcagcag

SEQ ID NO: 24218 - DNA, 19 bp, Homo sapiens
gatccccccagcagcagca

SEQ ID NO: 24219 - DNA, 19 bp, Homo sapiens
tgatccccccagcagcagc

SEQ ID NO: 24220 - DNA, 19 bp, Homo sapiens
gtgatccccccagcagcag

SEQ ID NO: 24221 - DNA, 19 bp, Homo sapiens
tgtgatccccccagcagca

SEQ ID NO: 24222 - DNA, 19 bp, Homo sapiens
ctgtgatccccccagcagc

SEQ ID NO: 24223 - DNA, 19 bp, Homo sapiens
tctgtgatccccccagcag

SEQ ID NO: 24224 - DNA, 19 bp, Homo sapiens
gtctgtgatccccccagca

SEQ ID NO: 24225 - DNA, 19 bp, Homo sapiens
ggtctgtgatccccccagc

SEQ ID NO: 24226 - DNA, 19 bp, Homo sapiens
tggtctgtgatccccccag

SEQ ID NO: 24227 - DNA, 19 bp, Homo sapiens
atggtctgtgatcccccca

SEQ ID NO: 24228 - DNA, 19 bp, Homo sapiens
aatggtctgtgatcccccc

SEQ ID NO: 24229 - DNA, 19 bp, Homo sapiens
aaatggtctgtgatccccc

SEQ ID NO: 24230 - DNA, 19 bp, Homo sapiens
gaaatggtctgtgatcccc

SEQ ID NO: 24231 - DNA, 19 bp, Homo sapiens
agaaatggtctgtgatccc

SEQ ID NO: 24232 - DNA, 19 bp, Homo sapiens
aagaaatggtctgtgatcc

SEQ ID NO: 24233 - DNA, 19 bp, Homo sapiens
aaagaaatggtctgtgatc

SEQ ID NO: 24234 - DNA, 19 bp, Homo sapiens
gaaagaaatggtctgtgat

SEQ ID NO: 24235 - DNA, 19 bp, Homo sapiens
agaaagaaatggtctgtga

SEQ ID NO: 24236 - DNA, 19 bp, Homo sapiens
aagaaagaaatggtctgtg

SEQ ID NO: 24237 - DNA, 19 bp, Homo sapiens
aaagaaagaaatggtctgt

SEQ ID NO: 24238 - DNA, 19 bp, Homo sapiens
gaaagaaagaaatggtctg

SEQ ID NO: 24239 - DNA, 19 bp, Homo sapiens
cgaaagaaagaaatggtct

SEQ ID NO: 24240 - DNA, 19 bp, Homo sapiens
ccgaaagaaagaaatggtc

SEQ ID NO: 24241 - DNA, 19 bp, Homo sapiens
gccgaaagaaagaaatggt

SEQ ID NO: 24242 - DNA, 19 bp, Homo sapiens
ggccgaaagaaagaaatgg

SEQ ID NO: 24243 - DNA, 19 bp, Homo sapiens
tggccgaaagaaagaaatg

SEQ ID NO: 24244 - DNA, 19 bp, Homo sapiens
ctggccgaaagaaagaaat

SEQ ID NO: 24245 - DNA, 19 bp, Homo sapiens
cctggccgaaagaaagaaa

SEQ ID NO: 24246 - DNA, 19 bp, Homo sapiens
gcctggccgaaagaaagaa

SEQ ID NO: 24247 - DNA, 19 bp, Homo sapiens
agcctggccgaaagaaaga

SEQ ID NO: 24248 - DNA, 19 bp, Homo sapiens
cagcctggccgaaagaaag

SEQ ID NO: 24249 - DNA, 19 bp, Homo sapiens
tcagcctggccgaaagaaa

SEQ ID NO: 24250 - DNA, 19 bp, Homo sapiens
ctcagcctggccgaaagaa

SEQ ID NO: 24251 - DNA, 19 bp, Homo sapiens
cctcagcctggccgaaaga

SEQ ID NO: 24252 - DNA, 19 bp, Homo sapiens
gcctcagcctggccgaaag

SEQ ID NO: 24253 - DNA, 19 bp, Homo sapiens
ggcctcagcctggccgaaa

SEQ ID NO: 24254 - DNA, 19 bp, Homo sapiens
gggcctcagcctggccgaa

SEQ ID NO: 24255 - DNA, 19 bp, Homo sapiens
agggcctcagcctggccga

SEQ ID NO: 24256 - DNA, 19 bp, Homo sapiens
cagggcctcagcctggccg

SEQ ID NO: 24257 - DNA, 19 bp, Homo sapiens
tcagggcctcagcctggcc

SEQ ID NO: 24258 - DNA, 19 bp, Homo sapiens
gtcagggcctcagcctggc

SEQ ID NO: 24259 - DNA, 19 bp, Homo sapiens
cgtcagggcctcagcctgg

SEQ ID NO: 24260 - DNA, 19 bp, Homo sapiens
acgtcagggcctcagcctg

SEQ ID NO: 24261 - DNA, 19 bp, Homo sapiens
cacgtcagggcctcagcct

SEQ ID NO: 24262 - DNA, 19 bp, Homo sapiens
ccacgtcagggcctcagcc

SEQ ID NO: 24263 - DNA, 19 bp, Homo sapiens
tccacgtcagggcctcagc

SEQ ID NO: 24264 - DNA, 19 bp, Homo sapiens
atccacgtcagggcctcag

SEQ ID NO: 24265 - DNA, 19 bp, Homo sapiens
catccacgtcagggcctca

SEQ ID NO: 24266 - DNA, 19 bp, Homo sapiens
ccatccacgtcagggcctc

SEQ ID NO: 24267 - DNA, 19 bp, Homo sapiens
cccatccacgtcagggcct

SEQ ID NO: 24268 - DNA, 19 bp, Homo sapiens
gcccatccacgtcagggcc

SEQ ID NO: 24269 - DNA, 19 bp, Homo sapiens
tgcccatccacgtcagggc

SEQ ID NO: 24270 - DNA, 19 bp, Homo sapiens
ttgcccatccacgtcaggg

SEQ ID NO: 24271 - DNA, 19 bp, Homo sapiens
tttgcccatccacgtcagg

SEQ ID NO: 24272 - DNA, 19 bp, Homo sapiens
gtttgcccatccacgtcag

SEQ ID NO: 24273 - DNA, 19 bp, Homo sapiens
agtttgcccatccacgtca

SEQ ID NO: 24274 - DNA, 19 bp, Homo sapiens
cagtttgcccatccacgtc

SEQ ID NO: 24275 - DNA, 19 bp, Homo sapiens
gcagtttgcccatccacgt

SEQ ID NO: 24276 - DNA, 19 bp, Homo sapiens
tgcagtttgcccatccacg

SEQ ID NO: 24277 - DNA, 19 bp, Homo sapiens
ctgcagtttgcccatccac

SEQ ID NO: 24278 - DNA, 19 bp, Homo sapiens
cctgcagtttgcccatcca

SEQ ID NO: 24279 - DNA, 19 bp, Homo sapiens
gcctgcagtttgcccatcc

SEQ ID NO: 24280 - DNA, 19 bp, Homo sapiens
ggcctgcagtttgcccatc

SEQ ID NO: 24281 - DNA, 19 bp, Homo sapiens
aggcctgcagtttgcccat

SEQ ID NO: 24282 - DNA, 19 bp, Homo sapiens
caggcctgcagtttgccca

SEQ ID NO: 24283 - DNA, 19 bp, Homo sapiens
ccaggcctgcagtttgccc

SEQ ID NO: 24284 - DNA, 19 bp, Homo sapiens
cccaggcctgcagtttgcc

SEQ ID NO: 24285 - DNA, 19 bp, Homo sapiens
tcccaggcctgcagtttgc

SEQ ID NO: 24286 - DNA, 19 bp, Homo sapiens
ttcccaggcctgcagtttg

SEQ ID NO: 24287 - DNA, 19 bp, Homo sapiens
cttcccaggcctgcagttt

SEQ ID NO: 24288 - DNA, 19 bp, Homo sapiens
ccttcccaggcctgcagtt

SEQ ID NO: 24289 - DNA, 19 bp, Homo sapiens
gccttcccaggcctgcagt

SEQ ID NO: 24290 - DNA, 19 bp, Homo sapiens
tgccttcccaggcctgcag

SEQ ID NO: 24291 - DNA, 19 bp, Homo sapiens
ctgccttcccaggcctgca

SEQ ID NO: 24292 - DNA, 19 bp, Homo sapiens
gctgccttcccaggcctgc

SEQ ID NO: 24293 - DNA, 19 bp, Homo sapiens
tgctgccttcccaggcctg

SEQ ID NO: 24294 - DNA, 19 bp, Homo sapiens
ttgctgccttcccaggcct

SEQ ID NO: 24295 - DNA, 19 bp, Homo sapiens
cttgctgccttcccaggcc

SEQ ID NO: 24296 - DNA, 19 bp, Homo sapiens
gcttgctgccttcccaggc

SEQ ID NO: 24297 - DNA, 19 bp, Homo sapiens
ggcttgctgccttcccagg

SEQ ID NO: 24298 - DNA, 19 bp, Homo sapiens
cggcttgctgccttcccag

SEQ ID NO: 24299 - DNA, 19 bp, Homo sapiens
ccggcttgctgccttccca

SEQ ID NO: 24300 - DNA, 19 bp, Homo sapiens
cccggcttgctgccttccc

SEQ ID NO: 24301 - DNA, 19 bp, Homo sapiens
gcccggcttgctgccttcc

SEQ ID NO: 24302 - DNA, 19 bp, Homo sapiens
ggcccggcttgctgccttc

SEQ ID NO: 24303 - DNA, 19 bp, Homo sapiens
cggcccggcttgctgcctt

SEQ ID NO: 24304 - DNA, 19 bp, Homo sapiens
acggcccggcttgctgcct

SEQ ID NO: 24305 - DNA, 19 bp, Homo sapiens
gacggcccggcttgctgcc

SEQ ID NO: 24306 - DNA, 19 bp, Homo sapiens
ggacggcccggcttgctgc

SEQ ID NO: 24307 - DNA, 19 bp, Homo sapiens
cggacggcccggcttgctg

SEQ ID NO: 24308 - DNA, 19 bp, Homo sapiens
acggacggcccggcttgct

SEQ ID NO: 24309 - DNA, 19 bp, Homo sapiens
cacggacggcccggcttgc

SEQ ID NO: 24310 - DNA, 19 bp, Homo sapiens
acacggacggcccggcttg

SEQ ID NO: 24311 - DNA, 19 bp, Homo sapiens
aacacggacggcccggctt

SEQ ID NO: 24312 - DNA, 19 bp, Homo sapiens
gaacacggacggcccggct

SEQ ID NO: 24313 - DNA, 19 bp, Homo sapiens
ggaacacggacggcccggc

SEQ ID NO: 24314 - DNA, 19 bp, Homo sapiens
tggaacacggacggcccgg

SEQ ID NO: 24315 - DNA, 19 bp, Homo sapiens
atggaacacggacggcccg

SEQ ID NO: 24316 - DNA, 19 bp, Homo sapiens
gatggaacacggacggccc

SEQ ID NO: 24317 - DNA, 19 bp, Homo sapiens
ggatggaacacggacggcc

SEQ ID NO: 24318 - DNA, 19 bp, Homo sapiens
aggatggaacacggacggc

SEQ ID NO: 24319 - DNA, 19 bp, Homo sapiens
gaggatggaacacggacgg

SEQ ID NO: 24320 - DNA, 19 bp, Homo sapiens
ggaggatggaacacggacg

SEQ ID NO: 24321 - DNA, 19 bp, Homo sapiens
tggaggatggaacacggac

SEQ ID NO: 24322 - DNA, 19 bp, Homo sapiens
gtggaggatggaacacgga

SEQ ID NO: 24323 - DNA, 19 bp, Homo sapiens
cgtggaggatggaacacgg

SEQ ID NO: 24324 - DNA, 19 bp, Homo sapiens
gcgtggaggatggaacacg

SEQ ID NO: 24325 - DNA, 19 bp, Homo sapiens
tgcgtggaggatggaacac

SEQ ID NO: 24326 - DNA, 19 bp, Homo sapiens
gtgcgtggaggatggaaca

SEQ ID NO: 24327 - DNA, 19 bp, Homo sapiens
ggtgcgtggaggatggaac

SEQ ID NO: 24328 - DNA, 19 bp, Homo sapiens
gggtgcgtggaggatggaa

SEQ ID NO: 24329 - DNA, 19 bp, Homo sapiens
ggggtgcgtggaggatgga

SEQ ID NO: 24330 - DNA, 19 bp, Homo sapiens
gggggtgcgtggaggatgg

SEQ ID NO: 24331 - DNA, 19 bp, Homo sapiens
tgggggtgcgtggaggatg

SEQ ID NO: 24332 - DNA, 19 bp, Homo sapiens
gtgggggtgcgtggaggat

SEQ ID NO: 24333 - DNA, 19 bp, Homo sapiens
ggtgggggtgcgtggagga

SEQ ID NO: 24334 - DNA, 19 bp, Homo sapiens
aggtgggggtgcgtggagg

SEQ ID NO: 24335 - DNA, 19 bp, Homo sapiens
taggtgggggtgcgtggag

SEQ ID NO: 24336 - DNA, 19 bp, Homo sapiens
ataggtgggggtgcgtgga

SEQ ID NO: 24337 - DNA, 19 bp, Homo sapiens
gataggtgggggtgcgtgg

SEQ ID NO: 24338 - DNA, 19 bp, Homo sapiens
cgataggtgggggtgcgtg

SEQ ID NO: 24339 - DNA, 19 bp, Homo sapiens
acgataggtgggggtgcgt

SEQ ID NO: 24340 - DNA, 19 bp, Homo sapiens
aacgataggtgggggtgcg

SEQ ID NO: 24341 - DNA, 19 bp, Homo sapiens
caacgataggtgggggtgc

SEQ ID NO: 24342 - DNA, 19 bp, Homo sapiens
ccaacgataggtgggggtg

SEQ ID NO: 24343 - DNA, 19 bp, Homo sapiens
accaacgataggtgggggt

SEQ ID NO: 24344 - DNA, 19 bp, Homo sapiens
aaccaacgataggtggggg

SEQ ID NO: 24345 - DNA, 19 bp, Homo sapiens
gaaccaacgataggtgggg

SEQ ID NO: 24346 - DNA, 19 bp, Homo sapiens
cgaaccaacgataggtggg

SEQ ID NO: 24347 - DNA, 19 bp, Homo sapiens
gcgaaccaacgataggtgg

SEQ ID NO: 24348 - DNA, 19 bp, Homo sapiens
tgcgaaccaacgataggtg

SEQ ID NO: 24349 - DNA, 19 bp, Homo sapiens
ttgcgaaccaacgataggt

SEQ ID NO: 24350 - DNA, 19 bp, Homo sapiens
tttgcgaaccaacgatagg

SEQ ID NO: 24351 - DNA, 19 bp, Homo sapiens
ctttgcgaaccaacgatag

SEQ ID NO: 24352 - DNA, 19 bp, Homo sapiens
actttgcgaaccaacgata

SEQ ID NO: 24353 - DNA, 19 bp, Homo sapiens
cactttgcgaaccaacgat

SEQ ID NO: 24354 - DNA, 19 bp, Homo sapiens
gcactttgcgaaccaacga

SEQ ID NO: 24355 - DNA, 19 bp, Homo sapiens
tgcactttgcgaaccaacg

SEQ ID NO: 24356 - DNA, 19 bp, Homo sapiens
ttgcactttgcgaaccaac

SEQ ID NO: 24357 - DNA, 19 bp, Homo sapiens
tttgcactttgcgaaccaa

SEQ ID NO: 24358 - DNA, 19 bp, Homo sapiens
ctttgcactttgcgaacca

SEQ ID NO: 24359 - DNA, 19 bp, Homo sapiens
gctttgcactttgcgaacc

SEQ ID NO: 24360 - DNA, 19 bp, Homo sapiens
agctttgcactttgcgaac

SEQ ID NO: 24361 - DNA, 19 bp, Homo sapiens
aagctttgcactttgcgaa

SEQ ID NO: 24362 - DNA, 19 bp, Homo sapiens
aaagctttgcactttgcga

SEQ ID NO: 24363 - DNA, 19 bp, Homo sapiens
gaaagctttgcactttgcg

SEQ ID NO: 24364 - DNA, 19 bp, Homo sapiens
agaaagctttgcactttgc

SEQ ID NO: 24365 - DNA, 19 bp, Homo sapiens
aagaaagctttgcactttg

SEQ ID NO: 24366 - DNA, 19 bp, Homo sapiens
caagaaagctttgcacttt

SEQ ID NO: 24367 - DNA, 19 bp, Homo sapiens
acaagaaagctttgcactt

SEQ ID NO: 24368 - DNA, 19 bp, Homo sapiens
cacaagaaagctttgcact

SEQ ID NO: 24369 - DNA, 19 bp, Homo sapiens
gcacaagaaagctttgcac

SEQ ID NO: 24370 - DNA, 19 bp, Homo sapiens
tgcacaagaaagctttgca

SEQ ID NO: 24371 - DNA, 19 bp, Homo sapiens
atgcacaagaaagctttgc

SEQ ID NO: 24372 - DNA, 19 bp, Homo sapiens
catgcacaagaaagctttg

SEQ ID NO: 24373 - DNA, 19 bp, Homo sapiens
tcatgcacaagaaagcttt

SEQ ID NO: 24374 - DNA, 19 bp, Homo sapiens
gtcatgcacaagaaagctt

SEQ ID NO: 24375 - DNA, 19 bp, Homo sapiens
cgtcatgcacaagaaagct

SEQ ID NO: 24376 - DNA, 19 bp, Homo sapiens
gcgtcatgcacaagaaagc

SEQ ID NO: 24377 - DNA, 19 bp, Homo sapiens
ggcgtcatgcacaagaaag

SEQ ID NO: 24378 - DNA, 19 bp, Homo sapiens
gggcgtcatgcacaagaaa

SEQ ID NO: 24379 - DNA, 19 bp, Homo sapiens
agggcgtcatgcacaagaa

SEQ ID NO: 24380 - DNA, 19 bp, Homo sapiens
cagggcgtcatgcacaaga

SEQ ID NO: 24381 - DNA, 19 bp, Homo sapiens
gcagggcgtcatgcacaag

SEQ ID NO: 24382 - DNA, 19 bp, Homo sapiens
agcagggcgtcatgcacaa

SEQ ID NO: 24383 - DNA, 19 bp, Homo sapiens
gagcagggcgtcatgcaca

SEQ ID NO: 24384 - DNA, 19 bp, Homo sapiens
agagcagggcgtcatgcac

SEQ ID NO: 24385 - DNA, 19 bp, Homo sapiens
cagagcagggcgtcatgca

SEQ ID NO: 24386 - DNA, 19 bp, Homo sapiens
ccagagcagggcgtcatgc

SEQ ID NO: 24387 - DNA, 19 bp, Homo sapiens
cccagagcagggcgtcatg

SEQ ID NO: 24388 - DNA, 19 bp, Homo sapiens
ccccagagcagggcgtcat

SEQ ID NO: 24389 - DNA, 19 bp, Homo sapiens
tccccagagcagggcgtca

SEQ ID NO: 24390 - DNA, 19 bp, Homo sapiens
ctccccagagcagggcgtc

SEQ ID NO: 24391 - DNA, 19 bp, Homo sapiens
gctccccagagcagggcgt

SEQ ID NO: 24392 - DNA, 19 bp, Homo sapiens
cgctccccagagcagggcg

SEQ ID NO: 24393 - DNA, 19 bp, Homo sapiens
acgctccccagagcagggc

SEQ ID NO: 24394 - DNA, 19 bp, Homo sapiens
gacgctccccagagcaggg

SEQ ID NO: 24395 - DNA, 19 bp, Homo sapiens
agacgctccccagagcagg

SEQ ID NO: 24396 - DNA, 19 bp, Homo sapiens
cagacgctccccagagcag

SEQ ID NO: 24397 - DNA, 19 bp, Homo sapiens
ccagacgctccccagagca

SEQ ID NO: 24398 - DNA, 19 bp, Homo sapiens
gccagacgctccccagagc

SEQ ID NO: 24399 - DNA, 19 bp, Homo sapiens
cgccagacgctccccagag

SEQ ID NO: 24400 - DNA, 19 bp, Homo sapiens
gcgccagacgctccccaga

SEQ ID NO: 24401 - DNA, 19 bp, Homo sapiens
cgcgccagacgctccccag

SEQ ID NO: 24402 - DNA, 19 bp, Homo sapiens
tcgcgccagacgctcccca

SEQ ID NO: 24403 - DNA, 19 bp, Homo sapiens
atcgcgccagacgctcccc

SEQ ID NO: 24404 - DNA, 19 bp, Homo sapiens
gatcgcgccagacgctccc

SEQ ID NO: 24405 - DNA, 19 bp, Homo sapiens
agatcgcgccagacgctcc

SEQ ID NO: 24406 - DNA, 19 bp, Homo sapiens
gagatcgcgccagacgctc

SEQ ID NO: 24407 - DNA, 19 bp, Homo sapiens
agagatcgcgccagacgct

SEQ ID NO: 24408 - DNA, 19 bp, Homo sapiens
cagagatcgcgccagacgc

SEQ ID NO: 24409 - DNA, 19 bp, Homo sapiens
gcagagatcgcgccagacg

SEQ ID NO: 24410 - DNA, 19 bp, Homo sapiens
ggcagagatcgcgccagac

SEQ ID NO: 24411 - DNA, 19 bp, Homo sapiens
aggcagagatcgcgccaga

SEQ ID NO: 24412 - DNA, 19 bp, Homo sapiens
caggcagagatcgcgccag

SEQ ID NO: 24413 - DNA, 19 bp, Homo sapiens
gcaggcagagatcgcgcca

SEQ ID NO: 24414 - DNA, 19 bp, Homo sapiens
agcaggcagagatcgcgcc

SEQ ID NO: 24415 - DNA, 19 bp, Homo sapiens
aagcaggcagagatcgcgc

SEQ ID NO: 24416 - DNA, 19 bp, Homo sapiens
taagcaggcagagatcgcg

SEQ ID NO: 24417 - DNA, 19 bp, Homo sapiens
gtaagcaggcagagatcgc

SEQ ID NO: 24418 - DNA, 19 bp, Homo sapiens
agtaagcaggcagagatcg

SEQ ID NO: 24419 - DNA, 19 bp, Homo sapiens
gagtaagcaggcagagatc

SEQ ID NO: 24420 - DNA, 19 bp, Homo sapiens
cgagtaagcaggcagagat

SEQ ID NO: 24421 - DNA, 19 bp, Homo sapiens
ccgagtaagcaggcagaga

SEQ ID NO: 24422 - DNA, 19 bp, Homo sapiens
cccgagtaagcaggcagag

SEQ ID NO: 24423 - DNA, 19 bp, Homo sapiens
tcccgagtaagcaggcaga

SEQ ID NO: 24424 - DNA, 19 bp, Homo sapiens
ttcccgagtaagcaggcag

SEQ ID NO: 24425 - DNA, 19 bp, Homo sapiens
tttcccgagtaagcaggca

SEQ ID NO: 24426 - DNA, 19 bp, Homo sapiens
atttcccgagtaagcaggc

SEQ ID NO: 24427 - DNA, 19 bp, Homo sapiens
aatttcccgagtaagcagg

SEQ ID NO: 24428 - DNA, 19 bp, Homo sapiens
aaatttcccgagtaagcag

SEQ ID NO: 24429 - DNA, 19 bp, Homo sapiens
caaatttcccgagtaagca

SEQ ID NO: 24430 - DNA, 19 bp, Homo sapiens
gcaaatttcccgagtaagc

SEQ ID NO: 24431 - DNA, 19 bp, Homo sapiens
agcaaatttcccgagtaag

SEQ ID NO: 24432 - DNA, 19 bp, Homo sapiens
aagcaaatttcccgagtaa

SEQ ID NO: 24433 - DNA, 19 bp, Homo sapiens
aaagcaaatttcccgagta

SEQ ID NO: 24434 - DNA, 19 bp, Homo sapiens
aaaagcaaatttcccgagt

SEQ ID NO: 24435 - DNA, 19 bp, Homo sapiens
caaaagcaaatttcccgag

SEQ ID NO: 24436 - DNA, 19 bp, Homo sapiens
gcaaaagcaaatttcccga

SEQ ID NO: 24437 - DNA, 19 bp, Homo sapiens
ggcaaaagcaaatttcccg

SEQ ID NO: 24438 - DNA, 19 bp, Homo sapiens
tggcaaaagcaaatttccc

SEQ ID NO: 24439 - DNA, 19 bp, Homo sapiens
ttggcaaaagcaaatttcc

SEQ ID NO: 24440 - DNA, 19 bp, Homo sapiens
tttggcaaaagcaaatttc

SEQ ID NO: 24441 - DNA, 19 bp, Homo sapiens
gtttggcaaaagcaaattt

SEQ ID NO: 24442 - DNA, 19 bp, Homo sapiens
ggtttggcaaaagcaaatt

SEQ ID NO: 24443 - DNA, 19 bp, Homo sapiens
gggtttggcaaaagcaaat

SEQ ID NO: 24444 - DNA, 19 bp, Homo sapiens
cgggtttggcaaaagcaaa

SEQ ID NO: 24445 - DNA, 19 bp, Homo sapiens
gcgggtttggcaaaagcaa

SEQ ID NO: 24446 - DNA, 19 bp, Homo sapiens
agcgggtttggcaaaagca

SEQ ID NO: 24447 - DNA, 19 bp, Homo sapiens
aagcgggtttggcaaaagc

SEQ ID NO: 24448 - DNA, 19 bp, Homo sapiens
aaagcgggtttggcaaaag

SEQ ID NO: 24449 - DNA, 19 bp, Homo sapiens
aaaagcgggtttggcaaaa

SEQ ID NO: 24450 - DNA, 19 bp, Homo sapiens
aaaaagcgggtttggcaaa

SEQ ID NO: 24451 - DNA, 19 bp, Homo sapiens
gaaaaagcgggtttggcaa

SEQ ID NO: 24452 - DNA, 19 bp, Homo sapiens
cgaaaaagcgggtttggca

SEQ ID NO: 24453 - DNA, 19 bp, Homo sapiens
ccgaaaaagcgggtttggc

SEQ ID NO: 24454 - DNA, 19 bp, Homo sapiens
cccgaaaaagcgggtttgg

SEQ ID NO: 24455 - DNA, 19 bp, Homo sapiens
ccccgaaaaagcgggtttg

SEQ ID NO: 24456 - DNA, 19 bp, Homo sapiens
tccccgaaaaagcgggttt

SEQ ID NO: 24457 - DNA, 19 bp, Homo sapiens
atccccgaaaaagcgggtt

SEQ ID NO: 24458 - DNA, 19 bp, Homo sapiens
gatccccgaaaaagcgggt

SEQ ID NO: 24459 - DNA, 19 bp, Homo sapiens
ggatccccgaaaaagcggg

SEQ ID NO: 24460 - DNA, 19 bp, Homo sapiens
gggatccccgaaaaagcgg

SEQ ID NO: 24461 - DNA, 19 bp, Homo sapiens
cgggatccccgaaaaagcg

SEQ ID NO: 24462 - DNA, 19 bp, Homo sapiens
gcgggatccccgaaaaagc

SEQ ID NO: 24463 - DNA, 19 bp, Homo sapiens
cgcgggatccccgaaaaag

SEQ ID NO: 24464 - DNA, 19 bp, Homo sapiens
gcgcgggatccccgaaaaa

SEQ ID NO: 24465 - DNA, 19 bp, Homo sapiens
ggcgcgggatccccgaaaa

SEQ ID NO: 24466 - DNA, 19 bp, Homo sapiens
gggcgcgggatccccgaaa

SEQ ID NO: 24467 - DNA, 19 bp, Homo sapiens
ggggcgcgggatccccgaa

SEQ ID NO: 24468 - DNA, 19 bp, Homo sapiens
gggggcgcgggatccccga

SEQ ID NO: 24469 - DNA, 19 bp, Homo sapiens
ggggggcgcgggatccccg

SEQ ID NO: 24470 - DNA, 19 bp, Homo sapiens
aggggggcgcgggatcccc

SEQ ID NO: 24471 - DNA, 19 bp, Homo sapiens
gaggggggcgcgggatccc

SEQ ID NO: 24472 - DNA, 19 bp, Homo sapiens
ggaggggggcgcgggatcc

SEQ ID NO: 24473 - DNA, 19 bp, Homo sapiens
aggaggggggcgcgggatc

SEQ ID NO: 24474 - DNA, 19 bp, Homo sapiens
gaggaggggggcgcgggat

SEQ ID NO: 24475 - DNA, 19 bp, Homo sapiens
tgaggaggggggcgcggga

SEQ ID NO: 24476 - DNA, 19 bp, Homo sapiens
gtgaggaggggggcgcggg

SEQ ID NO: 24477 - DNA, 19 bp, Homo sapiens
agtgaggaggggggcgcgg

SEQ ID NO: 24478 - DNA, 19 bp, Homo sapiens
aagtgaggaggggggcgcg

SEQ ID NO: 24479 - DNA, 19 bp, Homo sapiens
caagtgaggaggggggcgc

SEQ ID NO: 24480 - DNA, 19 bp, Homo sapiens
gcaagtgaggaggggggcg

SEQ ID NO: 24481 - DNA, 19 bp, Homo sapiens
cgcaagtgaggaggggggc

SEQ ID NO: 24482 - DNA, 19 bp, Homo sapiens
gcgcaagtgaggagggggg

SEQ ID NO: 24483 - DNA, 19 bp, Homo sapiens
agcgcaagtgaggaggggg

SEQ ID NO: 24484 - DNA, 19 bp, Homo sapiens
cagcgcaagtgaggagggg

SEQ ID NO: 24485 - DNA, 19 bp, Homo sapiens
gcagcgcaagtgaggaggg

SEQ ID NO: 24486 - DNA, 19 bp, Homo sapiens
agcagcgcaagtgaggagg

SEQ ID NO: 24487 - DNA, 19 bp, Homo sapiens
gagcagcgcaagtgaggag

SEQ ID NO: 24488 - DNA, 19 bp, Homo sapiens
agagcagcgcaagtgagga

SEQ ID NO: 24489 - DNA, 19 bp, Homo sapiens
gagagcagcgcaagtgagg

SEQ ID NO: 24490 - DNA, 19 bp, Homo sapiens
cgagagcagcgcaagtgag

SEQ ID NO: 24491 - DNA, 19 bp, Homo sapiens
ccgagagcagcgcaagtga

SEQ ID NO: 24492 - DNA, 19 bp, Homo sapiens
tccgagagcagcgcaagtg

SEQ ID NO: 24493 - DNA, 19 bp, Homo sapiens
ctccgagagcagcgcaagt

SEQ ID NO: 24494 - DNA, 19 bp, Homo sapiens
gctccgagagcagcgcaag

SEQ ID NO: 24495 - DNA, 19 bp, Homo sapiens
ggctccgagagcagcgcaa

SEQ ID NO: 24496 - DNA, 19 bp, Homo sapiens
gggctccgagagcagcgca

SEQ ID NO: 24497 - DNA, 19 bp, Homo sapiens
ggggctccgagagcagcgc

SEQ ID NO: 24498 - DNA, 19 bp, Homo sapiens
tggggctccgagagcagcg

SEQ ID NO: 24499 - DNA, 19 bp, Homo sapiens
ctggggctccgagagcagc

SEQ ID NO: 24500 - DNA, 19 bp, Homo sapiens
gctggggctccgagagcag

SEQ ID NO: 24501 - DNA, 19 bp, Homo sapiens
ggctggggctccgagagca

SEQ ID NO: 24502 - DNA, 19 bp, Homo sapiens
cggctggggctccgagagc

SEQ ID NO: 24503 - DNA, 19 bp, Homo sapiens
ccggctggggctccgagag

SEQ ID NO: 24504 - DNA, 19 bp, Homo sapiens
gccggctggggctccgaga

SEQ ID NO: 24505 - DNA, 19 bp, Homo sapiens
agccggctggggctccgag

SEQ ID NO: 24506 - DNA, 19 bp, Homo sapiens
gagccggctggggctccga

SEQ ID NO: 24507 - DNA, 19 bp, Homo sapiens
ggagccggctggggctccg

SEQ ID NO: 24508 - DNA, 19 bp, Homo sapiens
cggagccggctggggctcc

SEQ ID NO: 24509 - DNA, 19 bp, Homo sapiens
gcggagccggctggggctc

SEQ ID NO: 24510 - DNA, 19 bp, Homo sapiens
ggcggagccggctggggct

SEQ ID NO: 24511 - DNA, 19 bp, Homo sapiens
gggcggagccggctggggc

SEQ ID NO: 24512 - DNA, 19 bp, Homo sapiens
cgggcggagccggctgggg

SEQ ID NO: 24513 - DNA, 19 bp, Homo sapiens
gcgggcggagccggctggg

SEQ ID NO: 24514 - DNA, 19 bp, Homo sapiens
agcgggcggagccggctgg

SEQ ID NO: 24515 - DNA, 19 bp, Homo sapiens
aagcgggcggagccggctg

SEQ ID NO: 24516 - DNA, 19 bp, Homo sapiens
gaagcgggcggagccggct

SEQ ID NO: 24517 - DNA, 19 bp, Homo sapiens
cgaagcgggcggagccggc

SEQ ID NO: 24518 - DNA, 19 bp, Homo sapiens
ccgaagcgggcggagccgg

SEQ ID NO: 24519 - DNA, 19 bp, Homo sapiens
gccgaagcgggcggagccg

SEQ ID NO: 24520 - DNA, 19 bp, Homo sapiens
cgccgaagcgggcggagcc

SEQ ID NO: 24521 - DNA, 19 bp, Homo sapiens
ccgccgaagcgggcggagc

SEQ ID NO: 24522 - DNA, 19 bp, Homo sapiens
accgccgaagcgggcggag

SEQ ID NO: 24523 - DNA, 19 bp, Homo sapiens
aaccgccgaagcgggcgga

SEQ ID NO: 24524 - DNA, 19 bp, Homo sapiens
aaaccgccgaagcgggcgg

SEQ ID NO: 24525 - DNA, 19 bp, Homo sapiens
caaaccgccgaagcgggcg

SEQ ID NO: 24526 - DNA, 19 bp, Homo sapiens
ccaaaccgccgaagcgggc

SEQ ID NO: 24527 - DNA, 19 bp, Homo sapiens
tccaaaccgccgaagcggg

SEQ ID NO: 24528 - DNA, 19 bp, Homo sapiens
atccaaaccgccgaagcgg

SEQ ID NO: 24529 - DNA, 19 bp, Homo sapiens
tatccaaaccgccgaagcg

SEQ ID NO: 24530 - DNA, 19 bp, Homo sapiens
atatccaaaccgccgaagc

SEQ ID NO: 24531 - DNA, 19 bp, Homo sapiens
aatatccaaaccgccgaag

SEQ ID NO: 24532 - DNA, 19 bp, Homo sapiens
aaatatccaaaccgccgaa

SEQ ID NO: 24533 - DNA, 19 bp, Homo sapiens
taaatatccaaaccgccga

SEQ ID NO: 24534 - DNA, 19 bp, Homo sapiens
ataaatatccaaaccgccg

SEQ ID NO: 24535 - DNA, 19 bp, Homo sapiens
aataaatatccaaaccgcc

SEQ ID NO: 24536 - DNA, 19 bp, Homo sapiens
caataaatatccaaaccgc

SEQ ID NO: 24537 - DNA, 19 bp, Homo sapiens
tcaataaatatccaaaccg

SEQ ID NO: 24538 - DNA, 19 bp, Homo sapiens
gtcaataaatatccaaacc

SEQ ID NO: 24539 - DNA, 19 bp, Homo sapiens
ggtcaataaatatccaaac

SEQ ID NO: 24540 - DNA, 19 bp, Homo sapiens
aggtcaataaatatccaaa

SEQ ID NO: 24541 - DNA, 19 bp, Homo sapiens
gaggtcaataaatatccaa

SEQ ID NO: 24542 - DNA, 19 bp, Homo sapiens
cgaggtcaataaatatcca

SEQ ID NO: 24543 - DNA, 19 bp, Homo sapiens
acgaggtcaataaatatcc

SEQ ID NO: 24544 - DNA, 19 bp, Homo sapiens
gacgaggtcaataaatatc

SEQ ID NO: 24545 - DNA, 19 bp, Homo sapiens
ggacgaggtcaataaatat

SEQ ID NO: 24546 - DNA, 19 bp, Homo sapiens
aggacgaggtcaataaata

SEQ ID NO: 24547 - DNA, 19 bp, Homo sapiens
gaggacgaggtcaataaat

SEQ ID NO: 24548 - DNA, 19 bp, Homo sapiens
ggaggacgaggtcaataaa

SEQ ID NO: 24549 - DNA, 19 bp, Homo sapiens
cggaggacgaggtcaataa

SEQ ID NO: 24550 - DNA, 19 bp, Homo sapiens
tcggaggacgaggtcaata

SEQ ID NO: 24551 - DNA, 19 bp, Homo sapiens
gtcggaggacgaggtcaat

SEQ ID NO: 24552 - DNA, 19 bp, Homo sapiens
agtcggaggacgaggtcaa

SEQ ID NO: 24553 - DNA, 19 bp, Homo sapiens
gagtcggaggacgaggtca

SEQ ID NO: 24554 - DNA, 19 bp, Homo sapiens
cgagtcggaggacgaggtc

SEQ ID NO: 24555 - DNA, 19 bp, Homo sapiens
gcgagtcggaggacgaggt

SEQ ID NO: 24556 - DNA, 19 bp, Homo sapiens
agcgagtcggaggacgagg

SEQ ID NO: 24557 - DNA, 19 bp, Homo sapiens
cagcgagtcggaggacgag

SEQ ID NO: 24558 - DNA, 19 bp, Homo sapiens
tcagcgagtcggaggacga

SEQ ID NO: 24559 - DNA, 19 bp, Homo sapiens
gtcagcgagtcggaggacg

SEQ ID NO: 24560 - DNA, 19 bp, Homo sapiens
tgtcagcgagtcggaggac

SEQ ID NO: 24561 - DNA, 19 bp, Homo sapiens
ctgtcagcgagtcggagga

SEQ ID NO: 24562 - DNA, 19 bp, Homo sapiens
cctgtcagcgagtcggagg

SEQ ID NO: 24563 - DNA, 19 bp, Homo sapiens
gcctgtcagcgagtcggag

SEQ ID NO: 24564 - DNA, 19 bp, Homo sapiens
agcctgtcagcgagtcgga

SEQ ID NO: 24565 - DNA, 19 bp, Homo sapiens
tagcctgtcagcgagtcgg

SEQ ID NO: 24566 - DNA, 19 bp, Homo sapiens
gtagcctgtcagcgagtcg

SEQ ID NO: 24567 - DNA, 19 bp, Homo sapiens
tgtagcctgtcagcgagtc

SEQ ID NO: 24568 - DNA, 19 bp, Homo sapiens
ctgtagcctgtcagcgagt

SEQ ID NO: 24569 - DNA, 19 bp, Homo sapiens
cctgtagcctgtcagcgag

SEQ ID NO: 24570 - DNA, 19 bp, Homo sapiens
tcctgtagcctgtcagcga

SEQ ID NO: 24571 - DNA, 19 bp, Homo sapiens
gtcctgtagcctgtcagcg

SEQ ID NO: 24572 - DNA, 19 bp, Homo sapiens
ggtcctgtagcctgtcagc

SEQ ID NO: 24573 - DNA, 19 bp, Homo sapiens
gggtcctgtagcctgtcag

SEQ ID NO: 24574 - DNA, 19 bp, Homo sapiens
ggggtcctgtagcctgtca

SEQ ID NO: 24575 - DNA, 19 bp, Homo sapiens
gggggtcctgtagcctgtc

SEQ ID NO: 24576 - DNA, 19 bp, Homo sapiens
tgggggtcctgtagcctgt

SEQ ID NO: 24577 - DNA, 19 bp, Homo sapiens
ttgggggtcctgtagcctg

SEQ ID NO: 24578 - DNA, 19 bp, Homo sapiens
gttgggggtcctgtagcct

SEQ ID NO: 24579 - DNA, 19 bp, Homo sapiens
tgttgggggtcctgtagcc

SEQ ID NO: 24580 - DNA, 19 bp, Homo sapiens
ttgttgggggtcctgtagc

SEQ ID NO: 24581 - DNA, 19 bp, Homo sapiens
gttgttgggggtcctgtag

SEQ ID NO: 24582 - DNA, 19 bp, Homo sapiens
ggttgttgggggtcctgta

SEQ ID NO: 24583 - DNA, 19 bp, Homo sapiens
gggttgttgggggtcctgt

SEQ ID NO: 24584 - DNA, 19 bp, Homo sapiens
ggggttgttgggggtcctg

SEQ ID NO: 24585 - DNA, 19 bp, Homo sapiens
tggggttgttgggggtcct

SEQ ID NO: 24586 - DNA, 19 bp, Homo sapiens
ttggggttgttgggggtcc

SEQ ID NO: 24587 - DNA, 19 bp, Homo sapiens
attggggttgttgggggtc

SEQ ID NO: 24588 - DNA, 19 bp, Homo sapiens
gattggggttgttgggggt

SEQ ID NO: 24589 - DNA, 19 bp, Homo sapiens
ggattggggttgttggggg

SEQ ID NO: 24590 - DNA, 19 bp, Homo sapiens
tggattggggttgttgggg

SEQ ID NO: 24591 - DNA, 19 bp, Homo sapiens
gtggattggggttgttggg

SEQ ID NO: 24592 - DNA, 19 bp, Homo sapiens
cgtggattggggttgttgg

SEQ ID NO: 24593 - DNA, 19 bp, Homo sapiens
acgtggattggggttgttg

SEQ ID NO: 24594 - DNA, 19 bp, Homo sapiens
aacgtggattggggttgtt

SEQ ID NO: 24595 - DNA, 19 bp, Homo sapiens
aaacgtggattggggttgt

SEQ ID NO: 24596 - DNA, 19 bp, Homo sapiens
aaaacgtggattggggttg

SEQ ID NO: 24597 - DNA, 19 bp, Homo sapiens
caaaacgtggattggggtt

SEQ ID NO: 24598 - DNA, 19 bp, Homo sapiens
ccaaaacgtggattggggt

SEQ ID NO: 24599 - DNA, 19 bp, Homo sapiens
tccaaaacgtggattgggg

SEQ ID NO: 24600 - DNA, 19 bp, Homo sapiens
atccaaaacgtggattggg

SEQ ID NO: 24601 - DNA, 19 bp, Homo sapiens
catccaaaacgtggattgg

SEQ ID NO: 24602 - DNA, 19 bp, Homo sapiens
gcatccaaaacgtggattg

SEQ ID NO: 24603 - DNA, 19 bp, Homo sapiens
tgcatccaaaacgtggatt

SEQ ID NO: 24604 - DNA, 19 bp, Homo sapiens
gtgcatccaaaacgtggat

SEQ ID NO: 24605 - DNA, 19 bp, Homo sapiens
agtgcatccaaaacgtgga

SEQ ID NO: 24606 - DNA, 19 bp, Homo sapiens
cagtgcatccaaaacgtgg

SEQ ID NO: 24607 - DNA, 19 bp, Homo sapiens
tcagtgcatccaaaacgtg

SEQ ID NO: 24608 - DNA, 19 bp, Homo sapiens
ctcagtgcatccaaaacgt

SEQ ID NO: 24609 - DNA, 19 bp, Homo sapiens
tctcagtgcatccaaaacg

SEQ ID NO: 24610 - DNA, 19 bp, Homo sapiens
gtctcagtgcatccaaaac

SEQ ID NO: 24611 - DNA, 19 bp, Homo sapiens
ggtctcagtgcatccaaaa

SEQ ID NO: 24612 - DNA, 19 bp, Homo sapiens
gggtctcagtgcatccaaa

SEQ ID NO: 24613 - DNA, 19 bp, Homo sapiens
ggggtctcagtgcatccaa

SEQ ID NO: 24614 - DNA, 19 bp, Homo sapiens
cggggtctcagtgcatcca

SEQ ID NO: 24615 - DNA, 19 bp, Homo sapiens
tcggggtctcagtgcatcc

SEQ ID NO: 24616 - DNA, 19 bp, Homo sapiens
gtcggggtctcagtgcatc

SEQ ID NO: 24617 - DNA, 19 bp, Homo sapiens
tgtcggggtctcagtgcat

SEQ ID NO: 24618 - DNA, 19 bp, Homo sapiens
atgtcggggtctcagtgca

SEQ ID NO: 24619 - DNA, 19 bp, Homo sapiens
aatgtcggggtctcagtgc

SEQ ID NO: 24620 - DNA, 19 bp, Homo sapiens
gaatgtcggggtctcagtg

SEQ ID NO: 24621 - DNA, 19 bp, Homo sapiens
ggaatgtcggggtctcagt

SEQ ID NO: 24622 - DNA, 19 bp, Homo sapiens
aggaatgtcggggtctcag

SEQ ID NO: 24623 - DNA, 19 bp, Homo sapiens
gaggaatgtcggggtctca

SEQ ID NO: 24624 - DNA, 19 bp, Homo sapiens
cgaggaatgtcggggtctc

SEQ ID NO: 24625 - DNA, 19 bp, Homo sapiens
ccgaggaatgtcggggtct

SEQ ID NO: 24626 - DNA, 19 bp, Homo sapiens
accgaggaatgtcggggtc

SEQ ID NO: 24627 - DNA, 19 bp, Homo sapiens
taccgaggaatgtcggggt

SEQ ID NO: 24628 - DNA, 19 bp, Homo sapiens
ataccgaggaatgtcgggg

SEQ ID NO: 24629 - DNA, 19 bp, Homo sapiens
aataccgaggaatgtcggg

SEQ ID NO: 24630 - DNA, 19 bp, Homo sapiens
aaataccgaggaatgtcgg

SEQ ID NO: 24631 - DNA, 19 bp, Homo sapiens
taaataccgaggaatgtcg

SEQ ID NO: 24632 - DNA, 19 bp, Homo sapiens
ataaataccgaggaatgtc

SEQ ID NO: 24633 - DNA, 19 bp, Homo sapiens
aataaataccgaggaatgt

SEQ ID NO: 24634 - DNA, 19 bp, Homo sapiens
caataaataccgaggaatg

SEQ ID NO: 24635 - DNA, 19 bp, Homo sapiens
acaataaataccgaggaat

SEQ ID NO: 24636 - DNA, 19 bp, Homo sapiens
gacaataaataccgaggaa

SEQ ID NO: 24637 - DNA, 19 bp, Homo sapiens
agacaataaataccgagga

SEQ ID NO: 24638 - DNA, 19 bp, Homo sapiens
cagacaataaataccgagg

SEQ ID NO: 24639 - DNA, 19 bp, Homo sapiens
acagacaataaataccgag

SEQ ID NO: 24640 - DNA, 19 bp, Homo sapiens
gacagacaataaataccga

SEQ ID NO: 24641 - DNA, 19 bp, Homo sapiens
ggacagacaataaataccg

SEQ ID NO: 24642 - DNA, 19 bp, Homo sapiens
gggacagacaataaatacc

SEQ ID NO: 24643 - DNA, 19 bp, Homo sapiens
ggggacagacaataaatac

SEQ ID NO: 24644 - DNA, 19 bp, Homo sapiens
tggggacagacaataaata

SEQ ID NO: 24645 - DNA, 19 bp, Homo sapiens
gtggggacagacaataaat

SEQ ID NO: 24646 - DNA, 19 bp, Homo sapiens
ggtggggacagacaataaa

SEQ ID NO: 24647 - DNA, 19 bp, Homo sapiens
aggtggggacagacaataa

SEQ ID NO: 24648 - DNA, 19 bp, Homo sapiens
taggtggggacagacaata

SEQ ID NO: 24649 - DNA, 19 bp, Homo sapiens
ctaggtggggacagacaat

SEQ ID NO: 24650 - DNA, 19 bp, Homo sapiens
cctaggtggggacagacaa

SEQ ID NO: 24651 - DNA, 19 bp, Homo sapiens
tcctaggtggggacagaca

SEQ ID NO: 24652 - DNA, 19 bp, Homo sapiens
gtcctaggtggggacagac

SEQ ID NO: 24653 - DNA, 19 bp, Homo sapiens
ggtcctaggtggggacaga

SEQ ID NO: 24654 - DNA, 19 bp, Homo sapiens
gggtcctaggtggggacag

SEQ ID NO: 24655 - DNA, 19 bp, Homo sapiens
ggggtcctaggtggggaca

SEQ ID NO: 24656 - DNA, 19 bp, Homo sapiens
gggggtcctaggtggggac

SEQ ID NO: 24657 - DNA, 19 bp, Homo sapiens
tgggggtcctaggtgggga

SEQ ID NO: 24658 - DNA, 19 bp, Homo sapiens
gtgggggtcctaggtgggg

SEQ ID NO: 24659 - DNA, 19 bp, Homo sapiens
ggtgggggtcctaggtggg

SEQ ID NO: 24660 - DNA, 19 bp, Homo sapiens
gggtgggggtcctaggtgg

SEQ ID NO: 24661 - DNA, 19 bp, Homo sapiens
ggggtgggggtcctaggtg

SEQ ID NO: 24662 - DNA, 19 bp, Homo sapiens
gggggtgggggtcctaggt

SEQ ID NO: 24663 - DNA, 19 bp, Homo sapiens
cgggggtgggggtcctagg

SEQ ID NO: 24664 - DNA, 19 bp, Homo sapiens
tcgggggtgggggtcctag

SEQ ID NO: 24665 - DNA, 19 bp, Homo sapiens
gtcgggggtgggggtccta

SEQ ID NO: 24666 - DNA, 19 bp, Homo sapiens
ggtcgggggtgggggtcct

SEQ ID NO: 24667 - DNA, 19 bp, Homo sapiens
gggtcgggggtgggggtcc

SEQ ID NO: 24668 - DNA, 19 bp, Homo sapiens
agggtcgggggtgggggtc

SEQ ID NO: 24669 - DNA, 19 bp, Homo sapiens
gagggtcgggggtgggggt

SEQ ID NO: 24670 - DNA, 19 bp, Homo sapiens
cgagggtcgggggtggggg

SEQ ID NO: 24671 - DNA, 19 bp, Homo sapiens
gcgagggtcgggggtgggg

SEQ ID NO: 24672 - DNA, 19 bp, Homo sapiens
cgcgagggtcgggggtggg

SEQ ID NO: 24673 - DNA, 19 bp, Homo sapiens
tcgcgagggtcgggggtgg

SEQ ID NO: 24674 - DNA, 19 bp, Homo sapiens
ttcgcgagggtcgggggtg

SEQ ID NO: 24675 - DNA, 19 bp, Homo sapiens
attcgcgagggtcgggggt

SEQ ID NO: 24676 - DNA, 19 bp, Homo sapiens
tattcgcgagggtcggggg

SEQ ID NO: 24677 - DNA, 19 bp, Homo sapiens
ttattcgcgagggtcgggg

SEQ ID NO: 24678 - DNA, 19 bp, Homo sapiens
tttattcgcgagggtcggg

SEQ ID NO: 24679 - DNA, 19 bp, Homo sapiens
ttttattcgcgagggtcgg

SEQ ID NO: 24680 - DNA, 19 bp, Homo sapiens
cttttattcgcgagggtcg

SEQ ID NO: 24681 - DNA, 19 bp, Homo sapiens
ccttttattcgcgagggtc

SEQ ID NO: 24682 - DNA, 19 bp, Homo sapiens
gccttttattcgcgagggt

SEQ ID NO: 24683 - DNA, 19 bp, Homo sapiens
ggccttttattcgcgaggg

SEQ ID NO: 24684 - DNA, 19 bp, Homo sapiens
gggccttttattcgcgagg

SEQ ID NO: 24685 - DNA, 19 bp, Homo sapiens
agggccttttattcgcgag

SEQ ID NO: 24686 - DNA, 19 bp, Homo sapiens
gagggccttttattcgcga

SEQ ID NO: 24687 - DNA, 19 bp, Homo sapiens
ggagggccttttattcgcg

SEQ ID NO: 24688 - DNA, 19 bp, Homo sapiens
tggagggccttttattcgc

SEQ ID NO: 24689 - DNA, 19 bp, Homo sapiens
atggagggccttttattcg

SEQ ID NO: 24690 - DNA, 19 bp, Homo sapiens
gatggagggccttttattc

SEQ ID NO: 24691 - DNA, 19 bp, Homo sapiens
agatggagggccttttatt

SEQ ID NO: 24692 - DNA, 19 bp, Homo sapiens
cagatggagggccttttat

SEQ ID NO: 24693 - DNA, 19 bp, Homo sapiens
gcagatggagggcctttta

SEQ ID NO: 24694 - DNA, 19 bp, Homo sapiens
ggcagatggagggcctttt

SEQ ID NO: 24695 - DNA, 19 bp, Homo sapiens
gggcagatggagggccttt

SEQ ID NO: 24696 - DNA, 19 bp, Homo sapiens
tgggcagatggagggcctt

SEQ ID NO: 24697 - DNA, 19 bp, Homo sapiens
ttgggcagatggagggcct

SEQ ID NO: 24698 - DNA, 19 bp, Homo sapiens
tttgggcagatggagggcc

SEQ ID NO: 24699 - DNA, 19 bp, Homo sapiens
ctttgggcagatggagggc

SEQ ID NO: 24700 - DNA, 19 bp, Homo sapiens
gctttgggcagatggaggg

SEQ ID NO: 24701 - DNA, 19 bp, Homo sapiens
agctttgggcagatggagg

SEQ ID NO: 24702 - DNA, 19 bp, Homo sapiens
gagctttgggcagatggag

SEQ ID NO: 24703 - DNA, 19 bp, Homo sapiens
agagctttgggcagatgga

SEQ ID NO: 24704 - DNA, 19 bp, Homo sapiens
cagagctttgggcagatgg

SEQ ID NO: 24705 - DNA, 19 bp, Homo sapiens
ccagagctttgggcagatg

SEQ ID NO: 24706 - DNA, 19 bp, Homo sapiens
tccagagctttgggcagat

SEQ ID NO: 24707 - DNA, 19 bp, Homo sapiens
ttgtcccctgggcctctct

SEQ ID NO: 24708 - DNA, 19 bp, Homo sapiens
tctgtcccctgggcctctc

SEQ ID NO: 24709 - DNA, 19 bp, Homo sapiens
tgctgtcccctgggcctct

SEQ ID NO: 24710 - DNA, 19 bp, Homo sapiens
ttggctgtcccctgggcct

SEQ ID NO: 24711 - DNA, 19 bp, Homo sapiens
tctggctgtcccctgggcc

SEQ ID NO: 24712 - DNA, 19 bp, Homo sapiens
tcctggctgtcccctgggc

SEQ ID NO: 24713 - DNA, 19 bp, Homo sapiens
ttccctggctgtcccctgg

SEQ ID NO: 24714 - DNA, 19 bp, Homo sapiens
ttgtccctggctgtcccct

SEQ ID NO: 24715 - DNA, 19 bp, Homo sapiens
tctgtccctggctgtcccc

SEQ ID NO: 24716 - DNA, 19 bp, Homo sapiens
tcctgtccctggctgtccc

SEQ ID NO: 24717 - DNA, 19 bp, Homo sapiens
ttgcctgtccctggctgtc

SEQ ID NO: 24718 - DNA, 19 bp, Homo sapiens
ttctgcctgtccctggctg

SEQ ID NO: 24719 - DNA, 19 bp, Homo sapiens
ttgtctgcctgtccctggc

SEQ ID NO: 24720 - DNA, 19 bp, Homo sapiens
tatgtctgcctgtccctgg

SEQ ID NO: 24721 - DNA, 19 bp, Homo sapiens
tcatgtctgcctgtccctg

SEQ ID NO: 24722 - DNA, 19 bp, Homo sapiens
ttgcatgtctgcctgtccc

SEQ ID NO: 24723 - DNA, 19 bp, Homo sapiens
tctgcatgtctgcctgtcc

SEQ ID NO: 24724 - DNA, 19 bp, Homo sapiens
tgctgcatgtctgcctgtc

SEQ ID NO: 24725 - DNA, 19 bp, Homo sapiens
ttggctgcatgtctgcctg

SEQ ID NO: 24726 - DNA, 19 bp, Homo sapiens
tctggctgcatgtctgcct

SEQ ID NO: 24727 - DNA, 19 bp, Homo sapiens
tcctggctgcatgtctgcc

SEQ ID NO: 24728 - DNA, 19 bp, Homo sapiens
tccctggctgcatgtctgc

SEQ ID NO: 24729 - DNA, 19 bp, Homo sapiens
tgccctggctgcatgtctg

SEQ ID NO: 24730 - DNA, 19 bp, Homo sapiens
tagccctggctgcatgtct

SEQ ID NO: 24731 - DNA, 19 bp, Homo sapiens
tgagccctggctgcatgtc

SEQ ID NO: 24732 - DNA, 19 bp, Homo sapiens
ttggagccctggctgcatg

SEQ ID NO: 24733 - DNA, 19 bp, Homo sapiens
tctggagccctggctgcat

SEQ ID NO: 24734 - DNA, 19 bp, Homo sapiens
tcctggagccctggctgca

SEQ ID NO: 24735 - DNA, 19 bp, Homo sapiens
tccctggagccctggctgc

SEQ ID NO: 24736 - DNA, 19 bp, Homo sapiens
tgccctggagccctggctg

SEQ ID NO: 24737 - DNA, 19 bp, Homo sapiens
tggccctggagccctggct

SEQ ID NO: 24738 - DNA, 19 bp, Homo sapiens
taggccctggagccctggc

SEQ ID NO: 24739 - DNA, 19 bp, Homo sapiens
tcaggccctggagccctgg

SEQ ID NO: 24740 - DNA, 19 bp, Homo sapiens
ttccaggccctggagccct

SEQ ID NO: 24741 - DNA, 19 bp, Homo sapiens
ttgtccaggccctggagcc

SEQ ID NO: 24742 - DNA, 19 bp, Homo sapiens
tctgtccaggccctggagc

SEQ ID NO: 24743 - DNA, 19 bp, Homo sapiens
tcctgtccaggccctggag

SEQ ID NO: 24744 - DNA, 19 bp, Homo sapiens
tccctgtccaggccctgga

SEQ ID NO: 24745 - DNA, 19 bp, Homo sapiens
tcccctgtccaggccctgg

SEQ ID NO: 24746 - DNA, 19 bp, Homo sapiens
tgcccctgtccaggccctg

SEQ ID NO: 24747 - DNA, 19 bp, Homo sapiens
tagcccctgtccaggccct

SEQ ID NO: 24748 - DNA, 19 bp, Homo sapiens
tcagcccctgtccaggccc

SEQ ID NO: 24749 - DNA, 19 bp, Homo sapiens
tgcagcccctgtccaggcc

SEQ ID NO: 24750 - DNA, 19 bp, Homo sapiens
ttggcagcccctgtccagg

SEQ ID NO: 24751 - DNA, 19 bp, Homo sapiens
tctggcagcccctgtccag

SEQ ID NO: 24752 - DNA, 19 bp, Homo sapiens
tcctggcagcccctgtcca

SEQ ID NO: 24753 - DNA, 19 bp, Homo sapiens
tgcctggcagcccctgtcc

SEQ ID NO: 24754 - DNA, 19 bp, Homo sapiens
tggcctggcagcccctgtc

SEQ ID NO: 24755 - DNA, 19 bp, Homo sapiens
tgggcctggcagcccctgt

SEQ ID NO: 24756 - DNA, 19 bp, Homo sapiens
tagggcctggcagcccctg

SEQ ID NO: 24757 - DNA, 19 bp, Homo sapiens
tcagggcctggcagcccct

SEQ ID NO: 24758 - DNA, 19 bp, Homo sapiens
tacagggcctggcagcccc

SEQ ID NO: 24759 - DNA, 19 bp, Homo sapiens
ttcacagggcctggcagcc

SEQ ID NO: 24760 - DNA, 19 bp, Homo sapiens
ttgtcacagggcctggcag

SEQ ID NO: 24761 - DNA, 19 bp, Homo sapiens
tctgtcacagggcctggca

SEQ ID NO: 24762 - DNA, 19 bp, Homo sapiens
ttcctgtcacagggcctgg

SEQ ID NO: 24763 - DNA, 19 bp, Homo sapiens
tctcctgtcacagggcctg

SEQ ID NO: 24764 - DNA, 19 bp, Homo sapiens
ttcctcctgtcacagggcc

SEQ ID NO: 24765 - DNA, 19 bp, Homo sapiens
tgtcctcctgtcacagggc

SEQ ID NO: 24766 - DNA, 19 bp, Homo sapiens
tggtcctcctgtcacaggg

SEQ ID NO: 24767 - DNA, 19 bp, Homo sapiens
tgggtcctcctgtcacagg

SEQ ID NO: 24768 - DNA, 19 bp, Homo sapiens
tggggtcctcctgtcacag

SEQ ID NO: 24769 - DNA, 19 bp, Homo sapiens
ttcggggtcctcctgtcac

SEQ ID NO: 24770 - DNA, 19 bp, Homo sapiens
tctcggggtcctcctgtca

SEQ ID NO: 24771 - DNA, 19 bp, Homo sapiens
tgctcggggtcctcctgtc

SEQ ID NO: 24772 - DNA, 19 bp, Homo sapiens
tggctcggggtcctcctgt

SEQ ID NO: 24773 - DNA, 19 bp, Homo sapiens
tgggctcggggtcctcctg

SEQ ID NO: 24774 - DNA, 19 bp, Homo sapiens
tggggctcggggtcctcct

SEQ ID NO: 24775 - DNA, 19 bp, Homo sapiens
tgggggctcggggtcctcc

SEQ ID NO: 24776 - DNA, 19 bp, Homo sapiens
tcgggggctcggggtcctc

SEQ ID NO: 24777 - DNA, 19 bp, Homo sapiens
tccgggggctcggggtcct

SEQ ID NO: 24778 - DNA, 19 bp, Homo sapiens
tgccgggggctcggggtcc

SEQ ID NO: 24779 - DNA, 19 bp, Homo sapiens
tggccgggggctcggggtc

SEQ ID NO: 24780 - DNA, 19 bp, Homo sapiens
tgggccgggggctcggggt

SEQ ID NO: 24781 - DNA, 19 bp, Homo sapiens
tcgggccgggggctcgggg

SEQ ID NO: 24782 - DNA, 19 bp, Homo sapiens
tccgggccgggggctcggg

SEQ ID NO: 24783 - DNA, 19 bp, Homo sapiens
tcccgggccgggggctcgg

SEQ ID NO: 24784 - DNA, 19 bp, Homo sapiens
ttccccgggccgggggctc

SEQ ID NO: 24785 - DNA, 19 bp, Homo sapiens
tctccccgggccgggggct

SEQ ID NO: 24786 - DNA, 19 bp, Homo sapiens
tcctccccgggccgggggc

SEQ ID NO: 24787 - DNA, 19 bp, Homo sapiens
tccctccccgggccggggg

SEQ ID NO: 24788 - DNA, 19 bp, Homo sapiens
tcccctccccgggccgggg

SEQ ID NO: 24789 - DNA, 19 bp, Homo sapiens
tgcccctccccgggccggg

SEQ ID NO: 24790 - DNA, 19 bp, Homo sapiens
ttggcccctccccgggccg

SEQ ID NO: 24791 - DNA, 19 bp, Homo sapiens
tatggcccctccccgggcc

SEQ ID NO: 24792 - DNA, 19 bp, Homo sapiens
tcatggcccctccccgggc

SEQ ID NO: 24793 - DNA, 19 bp, Homo sapiens
tccatggcccctccccggg

SEQ ID NO: 24794 - DNA, 19 bp, Homo sapiens
taccatggcccctccccgg

SEQ ID NO: 24795 - DNA, 19 bp, Homo sapiens
tcaccatggcccctccccg

SEQ ID NO: 24796 - DNA, 19 bp, Homo sapiens
tgcaccatggcccctcccc

SEQ ID NO: 24797 - DNA, 19 bp, Homo sapiens
tagcaccatggcccctccc

SEQ ID NO: 24798 - DNA, 19 bp, Homo sapiens
tcagcaccatggcccctcc

SEQ ID NO: 24799 - DNA, 19 bp, Homo sapiens
tgcagcaccatggcccctc

SEQ ID NO: 24800 - DNA, 19 bp, Homo sapiens
tggcagcaccatggcccct

SEQ ID NO: 24801 - DNA, 19 bp, Homo sapiens
taggcagcaccatggcccc

SEQ ID NO: 24802 - DNA, 19 bp, Homo sapiens
tcaggcagcaccatggccc

SEQ ID NO: 24803 - DNA, 19 bp, Homo sapiens
tacaggcagcaccatggcc

SEQ ID NO: 24804 - DNA, 19 bp, Homo sapiens
tgacaggcagcaccatggc

SEQ ID NO: 24805 - DNA, 19 bp, Homo sapiens
tttggacaggcagcaccat

SEQ ID NO: 24806 - DNA, 19 bp, Homo sapiens
ttgttggacaggcagcacc

SEQ ID NO: 24807 - DNA, 19 bp, Homo sapiens
tatgttggacaggcagcac

SEQ ID NO: 24808 - DNA, 19 bp, Homo sapiens
tcatgttggacaggcagca

SEQ ID NO: 24809 - DNA, 19 bp, Homo sapiens
tacatgttggacaggcagc

SEQ ID NO: 24810 - DNA, 19 bp, Homo sapiens
ttgacatgttggacaggca

SEQ ID NO: 24811 - DNA, 19 bp, Homo sapiens
tctgacatgttggacaggc

SEQ ID NO: 24812 - DNA, 19 bp, Homo sapiens
tgctgacatgttggacagg

SEQ ID NO: 24813 - DNA, 19 bp, Homo sapiens
tggctgacatgttggacag

SEQ ID NO: 24814 - DNA, 19 bp, Homo sapiens
ttcggctgacatgttggac

SEQ ID NO: 24815 - DNA, 19 bp, Homo sapiens
tctcggctgacatgttgga

SEQ ID NO: 24816 - DNA, 19 bp, Homo sapiens
tcctcggctgacatgttgg

SEQ ID NO: 24817 - DNA, 19 bp, Homo sapiens
tacctcggctgacatgttg

SEQ ID NO: 24818 - DNA, 19 bp, Homo sapiens
tcacctcggctgacatgtt

SEQ ID NO: 24819 - DNA, 19 bp, Homo sapiens
tgcacctcggctgacatgt

SEQ ID NO: 24820 - DNA, 19 bp, Homo sapiens
tcgcacctcggctgacatg

SEQ ID NO: 24821 - DNA, 19 bp, Homo sapiens
tccgcacctcggctgacat

SEQ ID NO: 24822 - DNA, 19 bp, Homo sapiens
tgccgcacctcggctgaca

SEQ ID NO: 24823 - DNA, 19 bp, Homo sapiens
tagccgcacctcggctgac

SEQ ID NO: 24824 - DNA, 19 bp, Homo sapiens
ttcagccgcacctcggctg

SEQ ID NO: 24825 - DNA, 19 bp, Homo sapiens
tctcagccgcacctcggct

SEQ ID NO: 24826 - DNA, 19 bp, Homo sapiens
tcctcagccgcacctcggc

SEQ ID NO: 24827 - DNA, 19 bp, Homo sapiens
tgcctcagccgcacctcgg

SEQ ID NO: 24828 - DNA, 19 bp, Homo sapiens
tcgcctcagccgcacctcg

SEQ ID NO: 24829 - DNA, 19 bp, Homo sapiens
tccgcctcagccgcacctc

SEQ ID NO: 24830 - DNA, 19 bp, Homo sapiens
tgccgcctcagccgcacct

SEQ ID NO: 24831 - DNA, 19 bp, Homo sapiens
tagccgcctcagccgcacc

SEQ ID NO: 24832 - DNA, 19 bp, Homo sapiens
tgagccgcctcagccgcac

SEQ ID NO: 24833 - DNA, 19 bp, Homo sapiens
ttggagccgcctcagccgc

SEQ ID NO: 24834 - DNA, 19 bp, Homo sapiens
tctggagccgcctcagccg

SEQ ID NO: 24835 - DNA, 19 bp, Homo sapiens
ttgctggagccgcctcagc

SEQ ID NO: 24836 - DNA, 19 bp, Homo sapiens
tctgctggagccgcctcag

SEQ ID NO: 24837 - DNA, 19 bp, Homo sapiens
tgctgctggagccgcctca

SEQ ID NO: 24838 - DNA, 19 bp, Homo sapiens
tagctgctggagccgcctc

SEQ ID NO: 24839 - DNA, 19 bp, Homo sapiens
tcagctgctggagccgcct

SEQ ID NO: 24840 - DNA, 19 bp, Homo sapiens
tccagctgctggagccgcc

SEQ ID NO: 24841 - DNA, 19 bp, Homo sapiens
taccagctgctggagccgc

SEQ ID NO: 24842 - DNA, 19 bp, Homo sapiens
tcaccagctgctggagccg

SEQ ID NO: 24843 - DNA, 19 bp, Homo sapiens
tacaccagctgctggagcc

SEQ ID NO: 24844 - DNA, 19 bp, Homo sapiens
taacaccagctgctggagc

SEQ ID NO: 24845 - DNA, 19 bp, Homo sapiens
tcaacaccagctgctggag

SEQ ID NO: 24846 - DNA, 19 bp, Homo sapiens
ttccaacaccagctgctgg

SEQ ID NO: 24847 - DNA, 19 bp, Homo sapiens
tgtccaacaccagctgctg

SEQ ID NO: 24848 - DNA, 19 bp, Homo sapiens
tggtccaacaccagctgct

SEQ ID NO: 24849 - DNA, 19 bp, Homo sapiens
tgggtccaacaccagctgc

SEQ ID NO: 24850 - DNA, 19 bp, Homo sapiens
tcgggtccaacaccagctg

SEQ ID NO: 24851 - DNA, 19 bp, Homo sapiens
tccgggtccaacaccagct

SEQ ID NO: 24852 - DNA, 19 bp, Homo sapiens
tcccgggtccaacaccagc

SEQ ID NO: 24853 - DNA, 19 bp, Homo sapiens
tgcccgggtccaacaccag

SEQ ID NO: 24854 - DNA, 19 bp, Homo sapiens
tagcccgggtccaacacca

SEQ ID NO: 24855 - DNA, 19 bp, Homo sapiens
taagcccgggtccaacacc

SEQ ID NO: 24856 - DNA, 19 bp, Homo sapiens
tgaagcccgggtccaacac

SEQ ID NO: 24857 - DNA, 19 bp, Homo sapiens
tggaagcccgggtccaaca

SEQ ID NO: 24858 - DNA, 19 bp, Homo sapiens
taggaagcccgggtccaac

SEQ ID NO: 24859 - DNA, 19 bp, Homo sapiens
tcaggaagcccgggtccaa

SEQ ID NO: 24860 - DNA, 19 bp, Homo sapiens
tccaggaagcccgggtcca

SEQ ID NO: 24861 - DNA, 19 bp, Homo sapiens
tcccaggaagcccgggtcc

SEQ ID NO: 24862 - DNA, 19 bp, Homo sapiens
tccccaggaagcccgggtc

SEQ ID NO: 24863 - DNA, 19 bp, Homo sapiens
tgccccaggaagcccgggt

SEQ ID NO: 24864 - DNA, 19 bp, Homo sapiens
tagccccaggaagcccggg

SEQ ID NO: 24865 - DNA, 19 bp, Homo sapiens
tcagccccaggaagcccgg

SEQ ID NO: 24866 - DNA, 19 bp, Homo sapiens
ttccagccccaggaagccc

SEQ ID NO: 24867 - DNA, 19 bp, Homo sapiens
tctccagccccaggaagcc

SEQ ID NO: 24868 - DNA, 19 bp, Homo sapiens
tgctccagccccaggaagc

SEQ ID NO: 24869 - DNA, 19 bp, Homo sapiens
tggctccagccccaggaag

SEQ ID NO: 24870 - DNA, 19 bp, Homo sapiens
tgggctccagccccaggaa

SEQ ID NO: 24871 - DNA, 19 bp, Homo sapiens
tggggctccagccccagga

SEQ ID NO: 24872 - DNA, 19 bp, Homo sapiens
taggggctccagccccagg

SEQ ID NO: 24873 - DNA, 19 bp, Homo sapiens
tcaggggctccagccccag

SEQ ID NO: 24874 - DNA, 19 bp, Homo sapiens
tgcaggggctccagcccca

SEQ ID NO: 24875 - DNA, 19 bp, Homo sapiens
tagcaggggctccagcccc

SEQ ID NO: 24876 - DNA, 19 bp, Homo sapiens
tgagcaggggctccagccc

SEQ ID NO: 24877 - DNA, 19 bp, Homo sapiens
ttcgagcaggggctccagc

SEQ ID NO: 24878 - DNA, 19 bp, Homo sapiens
tgtcgagcaggggctccag

SEQ ID NO: 24879 - DNA, 19 bp, Homo sapiens
tggtcgagcaggggctcca

SEQ ID NO: 24880 - DNA, 19 bp, Homo sapiens
taggtcgagcaggggctcc

SEQ ID NO: 24881 - DNA, 19 bp, Homo sapiens
taaggtcgagcaggggctc

SEQ ID NO: 24882 - DNA, 19 bp, Homo sapiens
tgaaggtcgagcaggggct

SEQ ID NO: 24883 - DNA, 19 bp, Homo sapiens
tagaaggtcgagcaggggc

SEQ ID NO: 24884 - DNA, 19 bp, Homo sapiens
tgagaaggtcgagcagggg

SEQ ID NO: 24885 - DNA, 19 bp, Homo sapiens
tggagaaggtcgagcaggg

SEQ ID NO: 24886 - DNA, 19 bp, Homo sapiens
taggagaaggtcgagcagg

SEQ ID NO: 24887 - DNA, 19 bp, Homo sapiens
tcaggagaaggtcgagcag

SEQ ID NO: 24888 - DNA, 19 bp, Homo sapiens
tccaggagaaggtcgagca

SEQ ID NO: 24889 - DNA, 19 bp, Homo sapiens
tcccaggagaaggtcgagc

SEQ ID NO: 24890 - DNA, 19 bp, Homo sapiens
tgcccaggagaaggtcgag

SEQ ID NO: 24891 - DNA, 19 bp, Homo sapiens
tcgcccaggagaaggtcga

SEQ ID NO: 24892 - DNA, 19 bp, Homo sapiens
tacgcccaggagaaggtcg

SEQ ID NO: 24893 - DNA, 19 bp, Homo sapiens
tgacgcccaggagaaggtc

SEQ ID NO: 24894 - DNA, 19 bp, Homo sapiens
ttggacgcccaggagaagg

SEQ ID NO: 24895 - DNA, 19 bp, Homo sapiens
tgtggacgcccaggagaag

SEQ ID NO: 24896 - DNA, 19 bp, Homo sapiens
ttggtggacgcccaggaga

SEQ ID NO: 24897 - DNA, 19 bp, Homo sapiens
tctggtggacgcccaggag

SEQ ID NO: 24898 - DNA, 19 bp, Homo sapiens
ttcctggtggacgcccagg

SEQ ID NO: 24899 - DNA, 19 bp, Homo sapiens
tctcctggtggacgcccag

SEQ ID NO: 24900 - DNA, 19 bp, Homo sapiens
tgctcctggtggacgccca

SEQ ID NO: 24901 - DNA, 19 bp, Homo sapiens
tagctcctggtggacgccc

SEQ ID NO: 24902 - DNA, 19 bp, Homo sapiens
tcagctcctggtggacgcc

SEQ ID NO: 24903 - DNA, 19 bp, Homo sapiens
tccagctcctggtggacgc

SEQ ID NO: 24904 - DNA, 19 bp, Homo sapiens
tcccagctcctggtggacg

SEQ ID NO: 24905 - DNA, 19 bp, Homo sapiens
tgcccagctcctggtggac

SEQ ID NO: 24906 - DNA, 19 bp, Homo sapiens
tcgcccagctcctggtgga

SEQ ID NO: 24907 - DNA, 19 bp, Homo sapiens
tgcgcccagctcctggtgg

SEQ ID NO: 24908 - DNA, 19 bp, Homo sapiens
tggcgcccagctcctggtg

SEQ ID NO: 24909 - DNA, 19 bp, Homo sapiens
taggcgcccagctcctggt

SEQ ID NO: 24910 - DNA, 19 bp, Homo sapiens
tgaggcgcccagctcctgg

SEQ ID NO: 24911 - DNA, 19 bp, Homo sapiens
tggaggcgcccagctcctg

SEQ ID NO: 24912 - DNA, 19 bp, Homo sapiens
tttcggaggcgcccagctc

SEQ ID NO: 24913 - DNA, 19 bp, Homo sapiens
tgttcggaggcgcccagct

SEQ ID NO: 24914 - DNA, 19 bp, Homo sapiens
tagttcggaggcgcccagc

SEQ ID NO: 24915 - DNA, 19 bp, Homo sapiens
tcagttcggaggcgcccag

SEQ ID NO: 24916 - DNA, 19 bp, Homo sapiens
tccagttcggaggcgccca

SEQ ID NO: 24917 - DNA, 19 bp, Homo sapiens
tgccagttcggaggcgccc

SEQ ID NO: 24918 - DNA, 19 bp, Homo sapiens
tggccagttcggaggcgcc

SEQ ID NO: 24919 - DNA, 19 bp, Homo sapiens
ttgggccagttcggaggcg

SEQ ID NO: 24920 - DNA, 19 bp, Homo sapiens
tctgggccagttcggaggc

SEQ ID NO: 24921 - DNA, 19 bp, Homo sapiens
ttcctgggccagttcggag

SEQ ID NO: 24922 - DNA, 19 bp, Homo sapiens
tttgtcctgggccagttcg

SEQ ID NO: 24923 - DNA, 19 bp, Homo sapiens
tcttgtcctgggccagttc

SEQ ID NO: 24924 - DNA, 19 bp, Homo sapiens
ttacttgtcctgggccagt

SEQ ID NO: 24925 - DNA, 19 bp, Homo sapiens
tgtacttgtcctgggccag

SEQ ID NO: 24926 - DNA, 19 bp, Homo sapiens
tcgtacttgtcctgggcca

SEQ ID NO: 24927 - DNA, 19 bp, Homo sapiens
tacgtacttgtcctgggcc

SEQ ID NO: 24928 - DNA, 19 bp, Homo sapiens
tcacgtacttgtcctgggc

SEQ ID NO: 24929 - DNA, 19 bp, Homo sapiens
tccacgtacttgtcctggg

SEQ ID NO: 24930 - DNA, 19 bp, Homo sapiens
tgccacgtacttgtcctgg

SEQ ID NO: 24931 - DNA, 19 bp, Homo sapiens
tggccacgtacttgtcctg

SEQ ID NO: 24932 - DNA, 19 bp, Homo sapiens
ttcggccacgtacttgtcc

SEQ ID NO: 24933 - DNA, 19 bp, Homo sapiens
tgtcggccacgtacttgtc

SEQ ID NO: 24934 - DNA, 19 bp, Homo sapiens
tagtcggccacgtacttgt

SEQ ID NO: 24935 - DNA, 19 bp, Homo sapiens
taagtcggccacgtacttg

SEQ ID NO: 24936 - DNA, 19 bp, Homo sapiens
tgaagtcggccacgtactt

SEQ ID NO: 24937 - DNA, 19 bp, Homo sapiens
tagaagtcggccacgtact

SEQ ID NO: 24938 - DNA, 19 bp, Homo sapiens
taagaagtcggccacgtac

SEQ ID NO: 24939 - DNA, 19 bp, Homo sapiens
tcaagaagtcggccacgta

SEQ ID NO: 24940 - DNA, 19 bp, Homo sapiens
ttgcaagaagtcggccacg

SEQ ID NO: 24941 - DNA, 19 bp, Homo sapiens
tctgcaagaagtcggccac

SEQ ID NO: 24942 - DNA, 19 bp, Homo sapiens
tactgcaagaagtcggcca

SEQ ID NO: 24943 - DNA, 19 bp, Homo sapiens
tcactgcaagaagtcggcc

SEQ ID NO: 24944 - DNA, 19 bp, Homo sapiens
tccactgcaagaagtcggc

SEQ ID NO: 24945 - DNA, 19 bp, Homo sapiens
tcccactgcaagaagtcgg

SEQ ID NO: 24946 - DNA, 19 bp, Homo sapiens
tgcccactgcaagaagtcg

SEQ ID NO: 24947 - DNA, 19 bp, Homo sapiens
tcgcccactgcaagaagtc

SEQ ID NO: 24948 - DNA, 19 bp, Homo sapiens
ttccgcccactgcaagaag

SEQ ID NO: 24949 - DNA, 19 bp, Homo sapiens
tctccgcccactgcaagaa

SEQ ID NO: 24950 - DNA, 19 bp, Homo sapiens
tgctccgcccactgcaaga

SEQ ID NO: 24951 - DNA, 19 bp, Homo sapiens
tggctccgcccactgcaag

SEQ ID NO: 24952 - DNA, 19 bp, Homo sapiens
ttgggctccgcccactgca

SEQ ID NO: 24953 - DNA, 19 bp, Homo sapiens
tatgggctccgcccactgc

SEQ ID NO: 24954 - DNA, 19 bp, Homo sapiens
tgatgggctccgcccactg

SEQ ID NO: 24955 - DNA, 19 bp, Homo sapiens
tcgatgggctccgcccact

SEQ ID NO: 24956 - DNA, 19 bp, Homo sapiens
tacgatgggctccgcccac

SEQ ID NO: 24957 - DNA, 19 bp, Homo sapiens
tcacgatgggctccgccca

SEQ ID NO: 24958 - DNA, 19 bp, Homo sapiens
tccacgatgggctccgccc

SEQ ID NO: 24959 - DNA, 19 bp, Homo sapiens
taccacgatgggctccgcc

SEQ ID NO: 24960 - DNA, 19 bp, Homo sapiens
ttcaccacgatgggctccg

SEQ ID NO: 24961 - DNA, 19 bp, Homo sapiens
tctcaccacgatgggctcc

SEQ ID NO: 24962 - DNA, 19 bp, Homo sapiens
tcctcaccacgatgggctc

SEQ ID NO: 24963 - DNA, 19 bp, Homo sapiens
tgcctcaccacgatgggct

SEQ ID NO: 24964 - DNA, 19 bp, Homo sapiens
tagcctcaccacgatgggc

SEQ ID NO: 24965 - DNA, 19 bp, Homo sapiens
tttaagcctcaccacgatg

SEQ ID NO: 24966 - DNA, 19 bp, Homo sapiens
tcttaagcctcaccacgat

SEQ ID NO: 24967 - DNA, 19 bp, Homo sapiens
ttccttaagcctcaccacg

SEQ ID NO: 24968 - DNA, 19 bp, Homo sapiens
tctccttaagcctcaccac

SEQ ID NO: 24969 - DNA, 19 bp, Homo sapiens
tcctccttaagcctcacca

SEQ ID NO: 24970 - DNA, 19 bp, Homo sapiens
tacctccttaagcctcacc

SEQ ID NO: 24971 - DNA, 19 bp, Homo sapiens
tgacctccttaagcctcac

SEQ ID NO: 24972 - DNA, 19 bp, Homo sapiens
tggacctccttaagcctca

SEQ ID NO: 24973 - DNA, 19 bp, Homo sapiens
ttcggacctccttaagcct

SEQ ID NO: 24974 - DNA, 19 bp, Homo sapiens
tgtcggacctccttaagcc

SEQ ID NO: 24975 - DNA, 19 bp, Homo sapiens
tagtcggacctccttaagc

SEQ ID NO: 24976 - DNA, 19 bp, Homo sapiens
tcagtcggacctccttaag

SEQ ID NO: 24977 - DNA, 19 bp, Homo sapiens
ttgcagtcggacctcctta

SEQ ID NO: 24978 - DNA, 19 bp, Homo sapiens
ttctgcagtcggacctcct

SEQ ID NO: 24979 - DNA, 19 bp, Homo sapiens
tctctgcagtcggacctcc

SEQ ID NO: 24980 - DNA, 19 bp, Homo sapiens
tcctctgcagtcggacctc

SEQ ID NO: 24981 - DNA, 19 bp, Homo sapiens
ttccctctgcagtcggacc

SEQ ID NO: 24982 - DNA, 19 bp, Homo sapiens
tgtccctctgcagtcggac

SEQ ID NO: 24983 - DNA, 19 bp, Homo sapiens
ttcgtccctctgcagtcgg

SEQ ID NO: 24984 - DNA, 19 bp, Homo sapiens
tgtcgtccctctgcagtcg

SEQ ID NO: 24985 - DNA, 19 bp, Homo sapiens
tagtcgtccctctgcagtc

SEQ ID NO: 24986 - DNA, 19 bp, Homo sapiens
taagtcgtccctctgcagt

SEQ ID NO: 24987 - DNA, 19 bp, Homo sapiens
tgaagtcgtccctctgcag

SEQ ID NO: 24988 - DNA, 19 bp, Homo sapiens
ttcgaagtcgtccctctgc

SEQ ID NO: 24989 - DNA, 19 bp, Homo sapiens
ttctcgaagtcgtccctct

SEQ ID NO: 24990 - DNA, 19 bp, Homo sapiens
tatctcgaagtcgtccctc

SEQ ID NO: 24991 - DNA, 19 bp, Homo sapiens
taatctcgaagtcgtccct

SEQ ID NO: 24992 - DNA, 19 bp, Homo sapiens
tgaatctcgaagtcgtccc

SEQ ID NO: 24993 - DNA, 19 bp, Homo sapiens
tagaatctcgaagtcgtcc

SEQ ID NO: 24994 - DNA, 19 bp, Homo sapiens
tttcagaatctcgaagtcg

SEQ ID NO: 24995 - DNA, 19 bp, Homo sapiens
tcttcagaatctcgaagtc

SEQ ID NO: 24996 - DNA, 19 bp, Homo sapiens
tccttcagaatctcgaagt

SEQ ID NO: 24997 - DNA, 19 bp, Homo sapiens
taccttcagaatctcgaag

SEQ ID NO: 24998 - DNA, 19 bp, Homo sapiens
ttcaccttcagaatctcga

SEQ ID NO: 24999 - DNA, 19 bp, Homo sapiens
tatcaccttcagaatctcg

SEQ ID NO: 25000 - DNA, 19 bp, Homo sapiens
tgatcaccttcagaatctc

SEQ ID NO: 25001 - DNA, 19 bp, Homo sapiens
tcgatcaccttcagaatct

SEQ ID NO: 25002 - DNA, 19 bp, Homo sapiens
ttccgatcaccttcagaat

SEQ ID NO: 25003 - DNA, 19 bp, Homo sapiens
tgtccgatcaccttcagaa

SEQ ID NO: 25004 - DNA, 19 bp, Homo sapiens
tcgtccgatcaccttcaga

SEQ ID NO: 25005 - DNA, 19 bp, Homo sapiens
tgcgtccgatcaccttcag

SEQ ID NO: 25006 - DNA, 19 bp, Homo sapiens
tcgcgtccgatcaccttca

SEQ ID NO: 25007 - DNA, 19 bp, Homo sapiens
tccgcgtccgatcaccttc

SEQ ID NO: 25008 - DNA, 19 bp, Homo sapiens
tcccgcgtccgatcacctt

SEQ ID NO: 25009 - DNA, 19 bp, Homo sapiens
tccccgcgtccgatcacct

SEQ ID NO: 25010 - DNA, 19 bp, Homo sapiens
tgccccgcgtccgatcacc

SEQ ID NO: 25011 - DNA, 19 bp, Homo sapiens
tcgccccgcgtccgatcac

SEQ ID NO: 25012 - DNA, 19 bp, Homo sapiens
tacgccccgcgtccgatca

SEQ ID NO: 25013 - DNA, 19 bp, Homo sapiens
taacgccccgcgtccgatc

SEQ ID NO: 25014 - DNA, 19 bp, Homo sapiens
ttgaacgccccgcgtccga

SEQ ID NO: 25015 - DNA, 19 bp, Homo sapiens
tctgaacgccccgcgtccg

SEQ ID NO: 25016 - DNA, 19 bp, Homo sapiens
tgctgaacgccccgcgtcc

SEQ ID NO: 25017 - DNA, 19 bp, Homo sapiens
ttcgctgaacgccccgcgt

SEQ ID NO: 25018 - DNA, 19 bp, Homo sapiens
tctcgctgaacgccccgcg

SEQ ID NO: 25019 - DNA, 19 bp, Homo sapiens
tcctcgctgaacgccccgc

SEQ ID NO: 25020 - DNA, 19 bp, Homo sapiens
ttacctcgctgaacgcccc

SEQ ID NO: 25021 - DNA, 19 bp, Homo sapiens
tctacctcgctgaacgccc

SEQ ID NO: 25022 - DNA, 19 bp, Homo sapiens
tgctacctcgctgaacgcc

SEQ ID NO: 25023 - DNA, 19 bp, Homo sapiens
tcgctacctcgctgaacgc

SEQ ID NO: 25024 - DNA, 19 bp, Homo sapiens
tccgctacctcgctgaacg

SEQ ID NO: 25025 - DNA, 19 bp, Homo sapiens
ttaccgctacctcgctgaa

SEQ ID NO: 25026 - DNA, 19 bp, Homo sapiens
tctaccgctacctcgctga

SEQ ID NO: 25027 - DNA, 19 bp, Homo sapiens
tactaccgctacctcgctg

SEQ ID NO: 25028 - DNA, 19 bp, Homo sapiens
tttcactaccgctacctcg

SEQ ID NO: 25029 - DNA, 19 bp, Homo sapiens
ttcttcactaccgctacct

SEQ ID NO: 25030 - DNA, 19 bp, Homo sapiens
tatcttcactaccgctacc

SEQ ID NO: 25031 - DNA, 19 bp, Homo sapiens
tttcatcttcactaccgct

SEQ ID NO: 25032 - DNA, 19 bp, Homo sapiens
tcttcatcttcactaccgc

SEQ ID NO: 25033 - DNA, 19 bp, Homo sapiens
ttgcttcatcttcactacc

SEQ ID NO: 25034 - DNA, 19 bp, Homo sapiens
ttctgcttcatcttcacta

SEQ ID NO: 25035 - DNA, 19 bp, Homo sapiens
tgtctgcttcatcttcact

SEQ ID NO: 25036 - DNA, 19 bp, Homo sapiens
tcgtctgcttcatcttcac

SEQ ID NO: 25037 - DNA, 19 bp, Homo sapiens
tccgtctgcttcatcttca

SEQ ID NO: 25038 - DNA, 19 bp, Homo sapiens
tcccgtctgcttcatcttc

SEQ ID NO: 25039 - DNA, 19 bp, Homo sapiens
tgcccgtctgcttcatctt

SEQ ID NO: 25040 - DNA, 19 bp, Homo sapiens
ttggcccgtctgcttcatc

SEQ ID NO: 25041 - DNA, 19 bp, Homo sapiens
tctggcccgtctgcttcat

SEQ ID NO: 25042 - DNA, 19 bp, Homo sapiens
tcctggcccgtctgcttca

SEQ ID NO: 25043 - DNA, 19 bp, Homo sapiens
tacctggcccgtctgcttc

SEQ ID NO: 25044 - DNA, 19 bp, Homo sapiens
tcacctggcccgtctgctt

SEQ ID NO: 25045 - DNA, 19 bp, Homo sapiens
ttacacctggcccgtctgc

SEQ ID NO: 25046 - DNA, 19 bp, Homo sapiens
tatacacctggcccgtctg

SEQ ID NO: 25047 - DNA, 19 bp, Homo sapiens
tcatacacctggcccgtct

SEQ ID NO: 25048 - DNA, 19 bp, Homo sapiens
tgcatacacctggcccgtc

SEQ ID NO: 25049 - DNA, 19 bp, Homo sapiens
ttggcatacacctggcccg

SEQ ID NO: 25050 - DNA, 19 bp, Homo sapiens
tatggcatacacctggccc

SEQ ID NO: 25051 - DNA, 19 bp, Homo sapiens
tttcatggcatacacctgg

SEQ ID NO: 25052 - DNA, 19 bp, Homo sapiens
ttcttcatggcatacacct

SEQ ID NO: 25053 - DNA, 19 bp, Homo sapiens
tatcttcatggcatacacc

SEQ ID NO: 25054 - DNA, 19 bp, Homo sapiens
ttgatcttcatggcataca

SEQ ID NO: 25055 - DNA, 19 bp, Homo sapiens
tatgatcttcatggcatac

SEQ ID NO: 25056 - DNA, 19 bp, Homo sapiens
tttcatgatcttcatggca

SEQ ID NO: 25057 - DNA, 19 bp, Homo sapiens
tttgttcatgatcttcatg

SEQ ID NO: 25058 - DNA, 19 bp, Homo sapiens
tcttgttcatgatcttcat

SEQ ID NO: 25059 - DNA, 19 bp, Homo sapiens
tacttgttcatgatcttca

SEQ ID NO: 25060 - DNA, 19 bp, Homo sapiens
tcacttgttcatgatcttc

SEQ ID NO: 25061 - DNA, 19 bp, Homo sapiens
tccacttgttcatgatctt

SEQ ID NO: 25062 - DNA, 19 bp, Homo sapiens
ttcccacttgttcatgatc

SEQ ID NO: 25063 - DNA, 19 bp, Homo sapiens
ttgtcccacttgttcatga

SEQ ID NO: 25064 - DNA, 19 bp, Homo sapiens
tatgtcccacttgttcatg

SEQ ID NO: 25065 - DNA, 19 bp, Homo sapiens
tcatgtcccacttgttcat

SEQ ID NO: 25066 - DNA, 19 bp, Homo sapiens
tgcatgtcccacttgttca

SEQ ID NO: 25067 - DNA, 19 bp, Homo sapiens
tagcatgtcccacttgttc

SEQ ID NO: 25068 - DNA, 19 bp, Homo sapiens
tttcagcatgtcccacttg

SEQ ID NO: 25069 - DNA, 19 bp, Homo sapiens
ttcttcagcatgtcccact

SEQ ID NO: 25070 - DNA, 19 bp, Homo sapiens
tctcttcagcatgtcccac

SEQ ID NO: 25071 - DNA, 19 bp, Homo sapiens
tcctcttcagcatgtccca

SEQ ID NO: 25072 - DNA, 19 bp, Homo sapiens
tccctcttcagcatgtccc

SEQ ID NO: 25073 - DNA, 19 bp, Homo sapiens
tcccctcttcagcatgtcc

SEQ ID NO: 25074 - DNA, 19 bp, Homo sapiens
tgcccctcttcagcatgtc

SEQ ID NO: 25075 - DNA, 19 bp, Homo sapiens
ttcgcccctcttcagcatg

SEQ ID NO: 25076 - DNA, 19 bp, Homo sapiens
tctcgcccctcttcagcat

SEQ ID NO: 25077 - DNA, 19 bp, Homo sapiens
tcctcgcccctcttcagca

SEQ ID NO: 25078 - DNA, 19 bp, Homo sapiens
tacctcgcccctcttcagc

SEQ ID NO: 25079 - DNA, 19 bp, Homo sapiens
tcacctcgcccctcttcag

SEQ ID NO: 25080 - DNA, 19 bp, Homo sapiens
tacacctcgcccctcttca

SEQ ID NO: 25081 - DNA, 19 bp, Homo sapiens
tgacacctcgcccctcttc

SEQ ID NO: 25082 - DNA, 19 bp, Homo sapiens
tcgacacctcgcccctctt

SEQ ID NO: 25083 - DNA, 19 bp, Homo sapiens
tacgacacctcgcccctct

SEQ ID NO: 25084 - DNA, 19 bp, Homo sapiens
tcacgacacctcgcccctc

SEQ ID NO: 25085 - DNA, 19 bp, Homo sapiens
tgcacgacacctcgcccct

SEQ ID NO: 25086 - DNA, 19 bp, Homo sapiens
tagcacgacacctcgcccc

SEQ ID NO: 25087 - DNA, 19 bp, Homo sapiens
taagcacgacacctcgccc

SEQ ID NO: 25088 - DNA, 19 bp, Homo sapiens
tgaagcacgacacctcgcc

SEQ ID NO: 25089 - DNA, 19 bp, Homo sapiens
tggaagcacgacacctcgc

SEQ ID NO: 25090 - DNA, 19 bp, Homo sapiens
tcggaagcacgacacctcg

SEQ ID NO: 25091 - DNA, 19 bp, Homo sapiens
tacggaagcacgacacctc

SEQ ID NO: 25092 - DNA, 19 bp, Homo sapiens
ttcacggaagcacgacacc

SEQ ID NO: 25093 - DNA, 19 bp, Homo sapiens
tctcacggaagcacgacac

SEQ ID NO: 25094 - DNA, 19 bp, Homo sapiens
ttcctcacggaagcacgac

SEQ ID NO: 25095 - DNA, 19 bp, Homo sapiens
ttctcctcacggaagcacg

SEQ ID NO: 25096 - DNA, 19 bp, Homo sapiens
tctctcctcacggaagcac

SEQ ID NO: 25097 - DNA, 19 bp, Homo sapiens
tcctctcctcacggaagca

SEQ ID NO: 25098 - DNA, 19 bp, Homo sapiens
ttccctctcctcacggaag

SEQ ID NO: 25099 - DNA, 19 bp, Homo sapiens
tgtccctctcctcacggaa

SEQ ID NO: 25100 - DNA, 19 bp, Homo sapiens
tcgtccctctcctcacgga

SEQ ID NO: 25101 - DNA, 19 bp, Homo sapiens
tacgtccctctcctcacgg

SEQ ID NO: 25102 - DNA, 19 bp, Homo sapiens
tcacgtccctctcctcacg

SEQ ID NO: 25103 - DNA, 19 bp, Homo sapiens
tacacgtccctctcctcac

SEQ ID NO: 25104 - DNA, 19 bp, Homo sapiens
taacacgtccctctcctca

SEQ ID NO: 25105 - DNA, 19 bp, Homo sapiens
tcaacacgtccctctcctc

SEQ ID NO: 25106 - DNA, 19 bp, Homo sapiens
tccaacacgtccctctcct

SEQ ID NO: 25107 - DNA, 19 bp, Homo sapiens
taccaacacgtccctctcc

SEQ ID NO: 25108 - DNA, 19 bp, Homo sapiens
tttcaccaacacgtccctc

SEQ ID NO: 25109 - DNA, 19 bp, Homo sapiens
tattcaccaacacgtccct

SEQ ID NO: 25110 - DNA, 19 bp, Homo sapiens
tcattcaccaacacgtccc

SEQ ID NO: 25111 - DNA, 19 bp, Homo sapiens
tccattcaccaacacgtcc

SEQ ID NO: 25112 - DNA, 19 bp, Homo sapiens
tcccattcaccaacacgtc

SEQ ID NO: 25113 - DNA, 19 bp, Homo sapiens
ttccccattcaccaacacg

SEQ ID NO: 25114 - DNA, 19 bp, Homo sapiens
tgtccccattcaccaacac

SEQ ID NO: 25115 - DNA, 19 bp, Homo sapiens
tggtccccattcaccaaca

SEQ ID NO: 25116 - DNA, 19 bp, Homo sapiens
tcggtccccattcaccaac

SEQ ID NO: 25117 - DNA, 19 bp, Homo sapiens
tccggtccccattcaccaa

SEQ ID NO: 25118 - DNA, 19 bp, Homo sapiens
tgccggtccccattcacca

SEQ ID NO: 25119 - DNA, 19 bp, Homo sapiens
tcgccggtccccattcacc

SEQ ID NO: 25120 - DNA, 19 bp, Homo sapiens
tccgccggtccccattcac

SEQ ID NO: 25121 - DNA, 19 bp, Homo sapiens
taccgccggtccccattca

SEQ ID NO: 25122 - DNA, 19 bp, Homo sapiens
tcaccgccggtccccattc

SEQ ID NO: 25123 - DNA, 19 bp, Homo sapiens
ttccaccgccggtccccat

SEQ ID NO: 25124 - DNA, 19 bp, Homo sapiens
tatccaccgccggtcccca

SEQ ID NO: 25125 - DNA, 19 bp, Homo sapiens
ttgatccaccgccggtccc

SEQ ID NO: 25126 - DNA, 19 bp, Homo sapiens
tgtgatccaccgccggtcc

SEQ ID NO: 25127 - DNA, 19 bp, Homo sapiens
tcgtgatccaccgccggtc

SEQ ID NO: 25128 - DNA, 19 bp, Homo sapiens
ttgcgtgatccaccgccgg

SEQ ID NO: 25129 - DNA, 19 bp, Homo sapiens
tctgcgtgatccaccgccg

SEQ ID NO: 25130 - DNA, 19 bp, Homo sapiens
tgctgcgtgatccaccgcc

SEQ ID NO: 25131 - DNA, 19 bp, Homo sapiens
tagctgcgtgatccaccgc

SEQ ID NO: 25132 - DNA, 19 bp, Homo sapiens
tcagctgcgtgatccaccg

SEQ ID NO: 25133 - DNA, 19 bp, Homo sapiens
ttgcagctgcgtgatccac

SEQ ID NO: 25134 - DNA, 19 bp, Homo sapiens
tgtgcagctgcgtgatcca

SEQ ID NO: 25135 - DNA, 19 bp, Homo sapiens
tagtgcagctgcgtgatcc

SEQ ID NO: 25136 - DNA, 19 bp, Homo sapiens
taagtgcagctgcgtgatc

SEQ ID NO: 25137 - DNA, 19 bp, Homo sapiens
tgaagtgcagctgcgtgat

SEQ ID NO: 25138 - DNA, 19 bp, Homo sapiens
tcgaagtgcagctgcgtga

SEQ ID NO: 25139 - DNA, 19 bp, Homo sapiens
tgcgaagtgcagctgcgtg

SEQ ID NO: 25140 - DNA, 19 bp, Homo sapiens
tggcgaagtgcagctgcgt

SEQ ID NO: 25141 - DNA, 19 bp, Homo sapiens
taggcgaagtgcagctgcg

SEQ ID NO: 25142 - DNA, 19 bp, Homo sapiens
taaggcgaagtgcagctgc

SEQ ID NO: 25143 - DNA, 19 bp, Homo sapiens
tgaaggcgaagtgcagctg

SEQ ID NO: 25144 - DNA, 19 bp, Homo sapiens
ttggaaggcgaagtgcagc

SEQ ID NO: 25145 - DNA, 19 bp, Homo sapiens
tctggaaggcgaagtgcag

SEQ ID NO: 25146 - DNA, 19 bp, Homo sapiens
ttcctggaaggcgaagtgc

SEQ ID NO: 25147 - DNA, 19 bp, Homo sapiens
tatcctggaaggcgaagtg

SEQ ID NO: 25148 - DNA, 19 bp, Homo sapiens
ttcatcctggaaggcgaag

SEQ ID NO: 25149 - DNA, 19 bp, Homo sapiens
tttctcatcctggaaggcg

SEQ ID NO: 25150 - DNA, 19 bp, Homo sapiens
tgttctcatcctggaaggc

SEQ ID NO: 25151 - DNA, 19 bp, Homo sapiens
ttagttctcatcctggaag

SEQ ID NO: 25152 - DNA, 19 bp, Homo sapiens
tgtagttctcatcctggaa

SEQ ID NO: 25153 - DNA, 19 bp, Homo sapiens
tggtagttctcatcctgga

SEQ ID NO: 25154 - DNA, 19 bp, Homo sapiens
taggtagttctcatcctgg

SEQ ID NO: 25155 - DNA, 19 bp, Homo sapiens
tcaggtagttctcatcctg

SEQ ID NO: 25156 - DNA, 19 bp, Homo sapiens
ttacaggtagttctcatcc

SEQ ID NO: 25157 - DNA, 19 bp, Homo sapiens
tgtacaggtagttctcatc

SEQ ID NO: 25158 - DNA, 19 bp, Homo sapiens
tggtacaggtagttctcat

SEQ ID NO: 25159 - DNA, 19 bp, Homo sapiens
taggtacaggtagttctca

SEQ ID NO: 25160 - DNA, 19 bp, Homo sapiens
tcaggtacaggtagttctc

SEQ ID NO: 25161 - DNA, 19 bp, Homo sapiens
tccaggtacaggtagttct

SEQ ID NO: 25162 - DNA, 19 bp, Homo sapiens
taccaggtacaggtagttc

SEQ ID NO: 25163 - DNA, 19 bp, Homo sapiens
ttgaccaggtacaggtagt

SEQ ID NO: 25164 - DNA, 19 bp, Homo sapiens
tatgaccaggtacaggtag

SEQ ID NO: 25165 - DNA, 19 bp, Homo sapiens
tcatgaccaggtacaggta

SEQ ID NO: 25166 - DNA, 19 bp, Homo sapiens
ttccatgaccaggtacagg

SEQ ID NO: 25167 - DNA, 19 bp, Homo sapiens
tctccatgaccaggtacag

SEQ ID NO: 25168 - DNA, 19 bp, Homo sapiens
ttactccatgaccaggtac

SEQ ID NO: 25169 - DNA, 19 bp, Homo sapiens
tatactccatgaccaggta

SEQ ID NO: 25170 - DNA, 19 bp, Homo sapiens
ttaatactccatgaccagg

SEQ ID NO: 25171 - DNA, 19 bp, Homo sapiens
tgtaatactccatgaccag

SEQ ID NO: 25172 - DNA, 19 bp, Homo sapiens
tcgtaatactccatgacca

SEQ ID NO: 25173 - DNA, 19 bp, Homo sapiens
tacgtaatactccatgacc

SEQ ID NO: 25174 - DNA, 19 bp, Homo sapiens
tcacgtaatactccatgac

SEQ ID NO: 25175 - DNA, 19 bp, Homo sapiens
tccacgtaatactccatga

SEQ ID NO: 25176 - DNA, 19 bp, Homo sapiens
tcccacgtaatactccatg

SEQ ID NO: 25177 - DNA, 19 bp, Homo sapiens
tgcccacgtaatactccat

SEQ ID NO: 25178 - DNA, 19 bp, Homo sapiens
tcgcccacgtaatactcca

SEQ ID NO: 25179 - DNA, 19 bp, Homo sapiens
tccgcccacgtaatactcc

SEQ ID NO: 25180 - DNA, 19 bp, Homo sapiens
tcccgcccacgtaatactc

SEQ ID NO: 25181 - DNA, 19 bp, Homo sapiens
ttccccgcccacgtaatac

SEQ ID NO: 25182 - DNA, 19 bp, Homo sapiens
tgtccccgcccacgtaata

SEQ ID NO: 25183 - DNA, 19 bp, Homo sapiens
tggtccccgcccacgtaat

SEQ ID NO: 25184 - DNA, 19 bp, Homo sapiens
taggtccccgcccacgtaa

SEQ ID NO: 25185 - DNA, 19 bp, Homo sapiens
tcaggtccccgcccacgta

SEQ ID NO: 25186 - DNA, 19 bp, Homo sapiens
tgcaggtccccgcccacgt

SEQ ID NO: 25187 - DNA, 19 bp, Homo sapiens
tagcaggtccccgcccacg

SEQ ID NO: 25188 - DNA, 19 bp, Homo sapiens
ttcagcaggtccccgccca

SEQ ID NO: 25189 - DNA, 19 bp, Homo sapiens
ttgtcagcaggtccccgcc

SEQ ID NO: 25190 - DNA, 19 bp, Homo sapiens
tgtgtcagcaggtccccgc

SEQ ID NO: 25191 - DNA, 19 bp, Homo sapiens
tagtgtcagcaggtccccg

SEQ ID NO: 25192 - DNA, 19 bp, Homo sapiens
tcagtgtcagcaggtcccc

SEQ ID NO: 25193 - DNA, 19 bp, Homo sapiens
tgcagtgtcagcaggtccc

SEQ ID NO: 25194 - DNA, 19 bp, Homo sapiens
tagcagtgtcagcaggtcc

SEQ ID NO: 25195 - DNA, 19 bp, Homo sapiens
ttcagcagtgtcagcaggt

SEQ ID NO: 25196 - DNA, 19 bp, Homo sapiens
tctcagcagtgtcagcagg

SEQ ID NO: 25197 - DNA, 19 bp, Homo sapiens
tttgctcagcagtgtcagc

SEQ ID NO: 25198 - DNA, 19 bp, Homo sapiens
tcttgctcagcagtgtcag

SEQ ID NO: 25199 - DNA, 19 bp, Homo sapiens
tacttgctcagcagtgtca

SEQ ID NO: 25200 - DNA, 19 bp, Homo sapiens
taacttgctcagcagtgtc

SEQ ID NO: 25201 - DNA, 19 bp, Homo sapiens
taaacttgctcagcagtgt

SEQ ID NO: 25202 - DNA, 19 bp, Homo sapiens
tcaaacttgctcagcagtg

SEQ ID NO: 25203 - DNA, 19 bp, Homo sapiens
tccaaacttgctcagcagt

SEQ ID NO: 25204 - DNA, 19 bp, Homo sapiens
tcccaaacttgctcagcag

SEQ ID NO: 25205 - DNA, 19 bp, Homo sapiens
ttccccaaacttgctcagc

SEQ ID NO: 25206 - DNA, 19 bp, Homo sapiens
tctccccaaacttgctcag

SEQ ID NO: 25207 - DNA, 19 bp, Homo sapiens
tgctccccaaacttgctca

SEQ ID NO: 25208 - DNA, 19 bp, Homo sapiens
tcgctccccaaacttgctc

SEQ ID NO: 25209 - DNA, 19 bp, Homo sapiens
ttccgctccccaaacttgc

SEQ ID NO: 25210 - DNA, 19 bp, Homo sapiens
tatccgctccccaaacttg

SEQ ID NO: 25211 - DNA, 19 bp, Homo sapiens
taatccgctccccaaactt

SEQ ID NO: 25212 - DNA, 19 bp, Homo sapiens
tgaatccgctccccaaact

SEQ ID NO: 25213 - DNA, 19 bp, Homo sapiens
tggaatccgctccccaaac

SEQ ID NO: 25214 - DNA, 19 bp, Homo sapiens
tcggaatccgctccccaaa

SEQ ID NO: 25215 - DNA, 19 bp, Homo sapiens
tccggaatccgctccccaa

SEQ ID NO: 25216 - DNA, 19 bp, Homo sapiens
tgccggaatccgctcccca

SEQ ID NO: 25217 - DNA, 19 bp, Homo sapiens
tggccggaatccgctcccc

SEQ ID NO: 25218 - DNA, 19 bp, Homo sapiens
ttcggccggaatccgctcc

SEQ ID NO: 25219 - DNA, 19 bp, Homo sapiens
ttctcggccggaatccgct

SEQ ID NO: 25220 - DNA, 19 bp, Homo sapiens
tatctcggccggaatccgc

SEQ ID NO: 25221 - DNA, 19 bp, Homo sapiens
tcatctcggccggaatccg

SEQ ID NO: 25222 - DNA, 19 bp, Homo sapiens
tccatctcggccggaatcc

SEQ ID NO: 25223 - DNA, 19 bp, Homo sapiens
tgccatctcggccggaatc

SEQ ID NO: 25224 - DNA, 19 bp, Homo sapiens
tcgccatctcggccggaat

SEQ ID NO: 25225 - DNA, 19 bp, Homo sapiens
tgcgccatctcggccggaa

SEQ ID NO: 25226 - DNA, 19 bp, Homo sapiens
tcgcgccatctcggccgga

SEQ ID NO: 25227 - DNA, 19 bp, Homo sapiens
tgcgcgccatctcggccgg

SEQ ID NO: 25228 - DNA, 19 bp, Homo sapiens
tagcgcgccatctcggccg

SEQ ID NO: 25229 - DNA, 19 bp, Homo sapiens
taagcgcgccatctcggcc

SEQ ID NO: 25230 - DNA, 19 bp, Homo sapiens
tgaagcgcgccatctcggc

SEQ ID NO: 25231 - DNA, 19 bp, Homo sapiens
ttagaagcgcgccatctcg

SEQ ID NO: 25232 - DNA, 19 bp, Homo sapiens
tgtagaagcgcgccatctc

SEQ ID NO: 25233 - DNA, 19 bp, Homo sapiens
tggtagaagcgcgccatct

SEQ ID NO: 25234 - DNA, 19 bp, Homo sapiens
taggtagaagcgcgccatc

SEQ ID NO: 25235 - DNA, 19 bp, Homo sapiens
tcaggtagaagcgcgccat

SEQ ID NO: 25236 - DNA, 19 bp, Homo sapiens
tccaggtagaagcgcgcca

SEQ ID NO: 25237 - DNA, 19 bp, Homo sapiens
tgccaggtagaagcgcgcc

SEQ ID NO: 25238 - DNA, 19 bp, Homo sapiens
tcgccaggtagaagcgcgc

SEQ ID NO: 25239 - DNA, 19 bp, Homo sapiens
ttccgccaggtagaagcgc

SEQ ID NO: 25240 - DNA, 19 bp, Homo sapiens
ttctccgccaggtagaagc

SEQ ID NO: 25241 - DNA, 19 bp, Homo sapiens
tatctccgccaggtagaag

SEQ ID NO: 25242 - DNA, 19 bp, Homo sapiens
taatctccgccaggtagaa

SEQ ID NO: 25243 - DNA, 19 bp, Homo sapiens
tcaatctccgccaggtaga

SEQ ID NO: 25244 - DNA, 19 bp, Homo sapiens
tacaatctccgccaggtag

SEQ ID NO: 25245 - DNA, 19 bp, Homo sapiens
ttgacaatctccgccaggt

SEQ ID NO: 25246 - DNA, 19 bp, Homo sapiens
tatgacaatctccgccagg

SEQ ID NO: 25247 - DNA, 19 bp, Homo sapiens
tcatgacaatctccgccag

SEQ ID NO: 25248 - DNA, 19 bp, Homo sapiens
tccatgacaatctccgcca

SEQ ID NO: 25249 - DNA, 19 bp, Homo sapiens
tgccatgacaatctccgcc

SEQ ID NO: 25250 - DNA, 19 bp, Homo sapiens
ttggccatgacaatctccg

SEQ ID NO: 25251 - DNA, 19 bp, Homo sapiens
ttatggccatgacaatctc

SEQ ID NO: 25252 - DNA, 19 bp, Homo sapiens
ttctatggccatgacaatc

SEQ ID NO: 25253 - DNA, 19 bp, Homo sapiens
tgtctatggccatgacaat

SEQ ID NO: 25254 - DNA, 19 bp, Homo sapiens
tagtctatggccatgacaa

SEQ ID NO: 25255 - DNA, 19 bp, Homo sapiens
tgagtctatggccatgaca

SEQ ID NO: 25256 - DNA, 19 bp, Homo sapiens
tcgagtctatggccatgac

SEQ ID NO: 25257 - DNA, 19 bp, Homo sapiens
tccgagtctatggccatga

SEQ ID NO: 25258 - DNA, 19 bp, Homo sapiens
taccgagtctatggccatg

SEQ ID NO: 25259 - DNA, 19 bp, Homo sapiens
tcaccgagtctatggccat

SEQ ID NO: 25260 - DNA, 19 bp, Homo sapiens
ttgcaccgagtctatggcc

SEQ ID NO: 25261 - DNA, 19 bp, Homo sapiens
tgtgcaccgagtctatggc

SEQ ID NO: 25262 - DNA, 19 bp, Homo sapiens
tggtgcaccgagtctatgg

SEQ ID NO: 25263 - DNA, 19 bp, Homo sapiens
tcggtgcaccgagtctatg

SEQ ID NO: 25264 - DNA, 19 bp, Homo sapiens
tccggtgcaccgagtctat

SEQ ID NO: 25265 - DNA, 19 bp, Homo sapiens
tgccggtgcaccgagtcta

SEQ ID NO: 25266 - DNA, 19 bp, Homo sapiens
tagccggtgcaccgagtct

SEQ ID NO: 25267 - DNA, 19 bp, Homo sapiens
taagccggtgcaccgagtc

SEQ ID NO: 25268 - DNA, 19 bp, Homo sapiens
tcaagccggtgcaccgagt

SEQ ID NO: 25269 - DNA, 19 bp, Homo sapiens
tccaagccggtgcaccgag

SEQ ID NO: 25270 - DNA, 19 bp, Homo sapiens
tgccaagccggtgcaccga

SEQ ID NO: 25271 - DNA, 19 bp, Homo sapiens
ttagccaagccggtgcacc

SEQ ID NO: 25272 - DNA, 19 bp, Homo sapiens
tgtagccaagccggtgcac

SEQ ID NO: 25273 - DNA, 19 bp, Homo sapiens
tcgtagccaagccggtgca

SEQ ID NO: 25274 - DNA, 19 bp, Homo sapiens
tacgtagccaagccggtgc

SEQ ID NO: 25275 - DNA, 19 bp, Homo sapiens
tcacgtagccaagccggtg

SEQ ID NO: 25276 - DNA, 19 bp, Homo sapiens
ttgcacgtagccaagccgg

SEQ ID NO: 25277 - DNA, 19 bp, Homo sapiens
ttgtgcacgtagccaagcc

SEQ ID NO: 25278 - DNA, 19 bp, Homo sapiens
tctgtgcacgtagccaagc

SEQ ID NO: 25279 - DNA, 19 bp, Homo sapiens
tcctgtgcacgtagccaag

SEQ ID NO: 25280 - DNA, 19 bp, Homo sapiens
ttccctgtgcacgtagcca

SEQ ID NO: 25281 - DNA, 19 bp, Homo sapiens
ttgtccctgtgcacgtagc

SEQ ID NO: 25282 - DNA, 19 bp, Homo sapiens
tatgtccctgtgcacgtag

SEQ ID NO: 25283 - DNA, 19 bp, Homo sapiens
ttttgatgtccctgtgcac

SEQ ID NO: 25284 - DNA, 19 bp, Homo sapiens
tgtttgatgtccctgtgca

SEQ ID NO: 25285 - DNA, 19 bp, Homo sapiens
tggtttgatgtccctgtgc

SEQ ID NO: 25286 - DNA, 19 bp, Homo sapiens
tgggtttgatgtccctgtg

SEQ ID NO: 25287 - DNA, 19 bp, Homo sapiens
ttcgggtttgatgtccctg

SEQ ID NO: 25288 - DNA, 19 bp, Homo sapiens
tttgtcgggtttgatgtcc

SEQ ID NO: 25289 - DNA, 19 bp, Homo sapiens
ttgttgtcgggtttgatgt

SEQ ID NO: 25290 - DNA, 19 bp, Homo sapiens
tatgttgtcgggtttgatg

SEQ ID NO: 25291 - DNA, 19 bp, Homo sapiens
tgatgttgtcgggtttgat

SEQ ID NO: 25292 - DNA, 19 bp, Homo sapiens
tggatgttgtcgggtttga

SEQ ID NO: 25293 - DNA, 19 bp, Homo sapiens
taggatgttgtcgggtttg

SEQ ID NO: 25294 - DNA, 19 bp, Homo sapiens
tcaggatgttgtcgggttt

SEQ ID NO: 25295 - DNA, 19 bp, Homo sapiens
tgcaggatgttgtcgggtt

SEQ ID NO: 25296 - DNA, 19 bp, Homo sapiens
tagcaggatgttgtcgggt

SEQ ID NO: 25297 - DNA, 19 bp, Homo sapiens
tcagcaggatgttgtcggg

SEQ ID NO: 25298 - DNA, 19 bp, Homo sapiens
ttccagcaggatgttgtcg

SEQ ID NO: 25299 - DNA, 19 bp, Homo sapiens
tgtccagcaggatgttgtc

SEQ ID NO: 25300 - DNA, 19 bp, Homo sapiens
tggtccagcaggatgttgt

SEQ ID NO: 25301 - DNA, 19 bp, Homo sapiens
tcggtccagcaggatgttg

SEQ ID NO: 25302 - DNA, 19 bp, Homo sapiens
tgcggtccagcaggatgtt

SEQ ID NO: 25303 - DNA, 19 bp, Homo sapiens
tagcggtccagcaggatgt

SEQ ID NO: 25304 - DNA, 19 bp, Homo sapiens
tcagcggtccagcaggatg

SEQ ID NO: 25305 - DNA, 19 bp, Homo sapiens
tacagcggtccagcaggat

SEQ ID NO: 25306 - DNA, 19 bp, Homo sapiens
tcacagcggtccagcagga

SEQ ID NO: 25307 - DNA, 19 bp, Homo sapiens
tccacagcggtccagcagg

SEQ ID NO: 25308 - DNA, 19 bp, Homo sapiens
tgccacagcggtccagcag

SEQ ID NO: 25309 - DNA, 19 bp, Homo sapiens
ttggccacagcggtccagc

SEQ ID NO: 25310 - DNA, 19 bp, Homo sapiens
ttgtggccacagcggtcca

SEQ ID NO: 25311 - DNA, 19 bp, Homo sapiens
tatgtggccacagcggtcc

SEQ ID NO: 25312 - DNA, 19 bp, Homo sapiens
tgatgtggccacagcggtc

SEQ ID NO: 25313 - DNA, 19 bp, Homo sapiens
tggatgtggccacagcggt

SEQ ID NO: 25314 - DNA, 19 bp, Homo sapiens
tcggatgtggccacagcgg

SEQ ID NO: 25315 - DNA, 19 bp, Homo sapiens
tgcggatgtggccacagcg

SEQ ID NO: 25316 - DNA, 19 bp, Homo sapiens
tggcggatgtggccacagc

SEQ ID NO: 25317 - DNA, 19 bp, Homo sapiens
taggcggatgtggccacag

SEQ ID NO: 25318 - DNA, 19 bp, Homo sapiens
tcaggcggatgtggccaca

SEQ ID NO: 25319 - DNA, 19 bp, Homo sapiens
tccaggcggatgtggccac

SEQ ID NO: 25320 - DNA, 19 bp, Homo sapiens
tgccaggcggatgtggcca

SEQ ID NO: 25321 - DNA, 19 bp, Homo sapiens
tggccaggcggatgtggcc

SEQ ID NO: 25322 - DNA, 19 bp, Homo sapiens
ttcggccaggcggatgtgg

SEQ ID NO: 25323 - DNA, 19 bp, Homo sapiens
tgtcggccaggcggatgtg

SEQ ID NO: 25324 - DNA, 19 bp, Homo sapiens
tagtcggccaggcggatgt

SEQ ID NO: 25325 - DNA, 19 bp, Homo sapiens
taagtcggccaggcggatg

SEQ ID NO: 25326 - DNA, 19 bp, Homo sapiens
tgaagtcggccaggcggat

SEQ ID NO: 25327 - DNA, 19 bp, Homo sapiens
tcgaagtcggccaggcgga

SEQ ID NO: 25328 - DNA, 19 bp, Homo sapiens
tccgaagtcggccaggcgg

SEQ ID NO: 25329 - DNA, 19 bp, Homo sapiens
tgccgaagtcggccaggcg

SEQ ID NO: 25330 - DNA, 19 bp, Homo sapiens
tagccgaagtcggccaggc

SEQ ID NO: 25331 - DNA, 19 bp, Homo sapiens
tgagccgaagtcggccagg

SEQ ID NO: 25332 - DNA, 19 bp, Homo sapiens
tagagccgaagtcggccag

SEQ ID NO: 25333 - DNA, 19 bp, Homo sapiens
taagagccgaagtcggcca

SEQ ID NO: 25334 - DNA, 19 bp, Homo sapiens
tcaagagccgaagtcggcc

SEQ ID NO: 25335 - DNA, 19 bp, Homo sapiens
tgcaagagccgaagtcggc

SEQ ID NO: 25336 - DNA, 19 bp, Homo sapiens
tggcaagagccgaagtcgg

SEQ ID NO: 25337 - DNA, 19 bp, Homo sapiens
taggcaagagccgaagtcg

SEQ ID NO: 25338 - DNA, 19 bp, Homo sapiens
tttgaggcaagagccgaag

SEQ ID NO: 25339 - DNA, 19 bp, Homo sapiens
tcttgaggcaagagccgaa

SEQ ID NO: 25340 - DNA, 19 bp, Homo sapiens
tgcttgaggcaagagccga

SEQ ID NO: 25341 - DNA, 19 bp, Homo sapiens
tagcttgaggcaagagccg

SEQ ID NO: 25342 - DNA, 19 bp, Homo sapiens
tcagcttgaggcaagagcc

SEQ ID NO: 25343 - DNA, 19 bp, Homo sapiens
tgcagcttgaggcaagagc

SEQ ID NO: 25344 - DNA, 19 bp, Homo sapiens
tcgcagcttgaggcaagag

SEQ ID NO: 25345 - DNA, 19 bp, Homo sapiens
tccgcagcttgaggcaaga

SEQ ID NO: 25346 - DNA, 19 bp, Homo sapiens
tcccgcagcttgaggcaag

SEQ ID NO: 25347 - DNA, 19 bp, Homo sapiens
ttgcccgcagcttgaggca

SEQ ID NO: 25348 - DNA, 19 bp, Homo sapiens
ttctgcccgcagcttgagg

SEQ ID NO: 25349 - DNA, 19 bp, Homo sapiens
tatctgcccgcagcttgag

SEQ ID NO: 25350 - DNA, 19 bp, Homo sapiens
tcatctgcccgcagcttga

SEQ ID NO: 25351 - DNA, 19 bp, Homo sapiens
tttccatctgcccgcagct

SEQ ID NO: 25352 - DNA, 19 bp, Homo sapiens
tgttccatctgcccgcagc

SEQ ID NO: 25353 - DNA, 19 bp, Homo sapiens
tcgttccatctgcccgcag

SEQ ID NO: 25354 - DNA, 19 bp, Homo sapiens
tccgttccatctgcccgca

SEQ ID NO: 25355 - DNA, 19 bp, Homo sapiens
taccgttccatctgcccgc

SEQ ID NO: 25356 - DNA, 19 bp, Homo sapiens
tcaccgttccatctgcccg

SEQ ID NO: 25357 - DNA, 19 bp, Homo sapiens
tgcaccgttccatctgccc

SEQ ID NO: 25358 - DNA, 19 bp, Homo sapiens
tcgcaccgttccatctgcc

SEQ ID NO: 25359 - DNA, 19 bp, Homo sapiens
tccgcaccgttccatctgc

SEQ ID NO: 25360 - DNA, 19 bp, Homo sapiens
taccgcaccgttccatctg

SEQ ID NO: 25361 - DNA, 19 bp, Homo sapiens
tgaccgcaccgttccatct

SEQ ID NO: 25362 - DNA, 19 bp, Homo sapiens
tcgaccgcaccgttccatc

SEQ ID NO: 25363 - DNA, 19 bp, Homo sapiens
tgcgaccgcaccgttccat

SEQ ID NO: 25364 - DNA, 19 bp, Homo sapiens
tagcgaccgcaccgttcca

SEQ ID NO: 25365 - DNA, 19 bp, Homo sapiens
tcagcgaccgcaccgttcc

SEQ ID NO: 25366 - DNA, 19 bp, Homo sapiens
tccagcgaccgcaccgttc

SEQ ID NO: 25367 - DNA, 19 bp, Homo sapiens
taccagcgaccgcaccgtt

SEQ ID NO: 25368 - DNA, 19 bp, Homo sapiens
tcaccagcgaccgcaccgt

SEQ ID NO: 25369 - DNA, 19 bp, Homo sapiens
tccaccagcgaccgcaccg

SEQ ID NO: 25370 - DNA, 19 bp, Homo sapiens
tgccaccagcgaccgcacc

SEQ ID NO: 25371 - DNA, 19 bp, Homo sapiens
tagccaccagcgaccgcac

SEQ ID NO: 25372 - DNA, 19 bp, Homo sapiens
tcagccaccagcgaccgca

SEQ ID NO: 25373 - DNA, 19 bp, Homo sapiens
tacagccaccagcgaccgc

SEQ ID NO: 25374 - DNA, 19 bp, Homo sapiens
tcacagccaccagcgaccg

SEQ ID NO: 25375 - DNA, 19 bp, Homo sapiens
tccacagccaccagcgacc

SEQ ID NO: 25376 - DNA, 19 bp, Homo sapiens
tcccacagccaccagcgac

SEQ ID NO: 25377 - DNA, 19 bp, Homo sapiens
ttgcccacagccaccagcg

SEQ ID NO: 25378 - DNA, 19 bp, Homo sapiens
tgtgcccacagccaccagc

SEQ ID NO: 25379 - DNA, 19 bp, Homo sapiens
tggtgcccacagccaccag

SEQ ID NO: 25380 - DNA, 19 bp, Homo sapiens
tgggtgcccacagccacca

SEQ ID NO: 25381 - DNA, 19 bp, Homo sapiens
ttggggtgcccacagccac

SEQ ID NO: 25382 - DNA, 19 bp, Homo sapiens
ttctggggtgcccacagcc

SEQ ID NO: 25383 - DNA, 19 bp, Homo sapiens
tgtctggggtgcccacagc

SEQ ID NO: 25384 - DNA, 19 bp, Homo sapiens
ttagtctggggtgcccaca

SEQ ID NO: 25385 - DNA, 19 bp, Homo sapiens
tgtagtctggggtgcccac

SEQ ID NO: 25386 - DNA, 19 bp, Homo sapiens
tggtagtctggggtgccca

SEQ ID NO: 25387 - DNA, 19 bp, Homo sapiens
taggtagtctggggtgccc

SEQ ID NO: 25388 - DNA, 19 bp, Homo sapiens
tcaggtagtctggggtgcc

SEQ ID NO: 25389 - DNA, 19 bp, Homo sapiens
tacaggtagtctggggtgc

SEQ ID NO: 25390 - DNA, 19 bp, Homo sapiens
tgacaggtagtctggggtg

SEQ ID NO: 25391 - DNA, 19 bp, Homo sapiens
tggacaggtagtctggggt

SEQ ID NO: 25392 - DNA, 19 bp, Homo sapiens
tgggacaggtagtctgggg

SEQ ID NO: 25393 - DNA, 19 bp, Homo sapiens
tggggacaggtagtctggg

SEQ ID NO: 25394 - DNA, 19 bp, Homo sapiens
tgggggacaggtagtctgg

SEQ ID NO: 25395 - DNA, 19 bp, Homo sapiens
ttcgggggacaggtagtct

SEQ ID NO: 25396 - DNA, 19 bp, Homo sapiens
ttctcgggggacaggtagt

SEQ ID NO: 25397 - DNA, 19 bp, Homo sapiens
tatctcgggggacaggtag

SEQ ID NO: 25398 - DNA, 19 bp, Homo sapiens
tgatctcgggggacaggta

SEQ ID NO: 25399 - DNA, 19 bp, Homo sapiens
tggatctcgggggacaggt

SEQ ID NO: 25400 - DNA, 19 bp, Homo sapiens
taggatctcgggggacagg

SEQ ID NO: 25401 - DNA, 19 bp, Homo sapiens
tcaggatctcgggggacag

SEQ ID NO: 25402 - DNA, 19 bp, Homo sapiens
ttgcaggatctcgggggac

SEQ ID NO: 25403 - DNA, 19 bp, Homo sapiens
tctgcaggatctcggggga

SEQ ID NO: 25404 - DNA, 19 bp, Homo sapiens
tcctgcaggatctcggggg

SEQ ID NO: 25405 - DNA, 19 bp, Homo sapiens
tgcctgcaggatctcgggg

SEQ ID NO: 25406 - DNA, 19 bp, Homo sapiens
tagcctgcaggatctcggg

SEQ ID NO: 25407 - DNA, 19 bp, Homo sapiens
tcagcctgcaggatctcgg

SEQ ID NO: 25408 - DNA, 19 bp, Homo sapiens
tacagcctgcaggatctcg

SEQ ID NO: 25409 - DNA, 19 bp, Homo sapiens
tcacagcctgcaggatctc

SEQ ID NO: 25410 - DNA, 19 bp, Homo sapiens
tccacagcctgcaggatct

SEQ ID NO: 25411 - DNA, 19 bp, Homo sapiens
tcccacagcctgcaggatc

SEQ ID NO: 25412 - DNA, 19 bp, Homo sapiens
tgcccacagcctgcaggat

SEQ ID NO: 25413 - DNA, 19 bp, Homo sapiens
tcgcccacagcctgcagga

SEQ ID NO: 25414 - DNA, 19 bp, Homo sapiens
tccgcccacagcctgcagg

SEQ ID NO: 25415 - DNA, 19 bp, Homo sapiens
taccgcccacagcctgcag

SEQ ID NO: 25416 - DNA, 19 bp, Homo sapiens
tcaccgcccacagcctgca

SEQ ID NO: 25417 - DNA, 19 bp, Homo sapiens
tccaccgcccacagcctgc

SEQ ID NO: 25418 - DNA, 19 bp, Homo sapiens
tcccaccgcccacagcctg

SEQ ID NO: 25419 - DNA, 19 bp, Homo sapiens
tgcccaccgcccacagcct

SEQ ID NO: 25420 - DNA, 19 bp, Homo sapiens
tggcccaccgcccacagcc

SEQ ID NO: 25421 - DNA, 19 bp, Homo sapiens
taggcccaccgcccacagc

SEQ ID NO: 25422 - DNA, 19 bp, Homo sapiens
tcaggcccaccgcccacag

SEQ ID NO: 25423 - DNA, 19 bp, Homo sapiens
tccaggcccaccgcccaca

SEQ ID NO: 25424 - DNA, 19 bp, Homo sapiens
ttcccaggcccaccgccca

SEQ ID NO: 25425 - DNA, 19 bp, Homo sapiens
ttgtcccaggcccaccgcc

SEQ ID NO: 25426 - DNA, 19 bp, Homo sapiens
tctgtcccaggcccaccgc

SEQ ID NO: 25427 - DNA, 19 bp, Homo sapiens
tcctgtcccaggcccaccg

SEQ ID NO: 25428 - DNA, 19 bp, Homo sapiens
ttgcctgtcccaggcccac

SEQ ID NO: 25429 - DNA, 19 bp, Homo sapiens
tctgcctgtcccaggccca

SEQ ID NO: 25430 - DNA, 19 bp, Homo sapiens
tgctgcctgtcccaggccc

SEQ ID NO: 25431 - DNA, 19 bp, Homo sapiens
ttagctgcctgtcccaggc

SEQ ID NO: 25432 - DNA, 19 bp, Homo sapiens
tgtagctgcctgtcccagg

SEQ ID NO: 25433 - DNA, 19 bp, Homo sapiens
tcgtagctgcctgtcccag

SEQ ID NO: 25434 - DNA, 19 bp, Homo sapiens
tccgtagctgcctgtccca

SEQ ID NO: 25435 - DNA, 19 bp, Homo sapiens
tcccgtagctgcctgtccc

SEQ ID NO: 25436 - DNA, 19 bp, Homo sapiens
tgcccgtagctgcctgtcc

SEQ ID NO: 25437 - DNA, 19 bp, Homo sapiens
tggcccgtagctgcctgtc

SEQ ID NO: 25438 - DNA, 19 bp, Homo sapiens
tgggcccgtagctgcctgt

SEQ ID NO: 25439 - DNA, 19 bp, Homo sapiens
ttcgggcccgtagctgcct

SEQ ID NO: 25440 - DNA, 19 bp, Homo sapiens
tctcgggcccgtagctgcc

SEQ ID NO: 25441 - DNA, 19 bp, Homo sapiens
tactcgggcccgtagctgc

SEQ ID NO: 25442 - DNA, 19 bp, Homo sapiens
tcactcgggcccgtagctg

SEQ ID NO: 25443 - DNA, 19 bp, Homo sapiens
tacactcgggcccgtagct

SEQ ID NO: 25444 - DNA, 19 bp, Homo sapiens
ttcacactcgggcccgtag

SEQ ID NO: 25445 - DNA, 19 bp, Homo sapiens
tgtcacactcgggcccgta

SEQ ID NO: 25446 - DNA, 19 bp, Homo sapiens
tagtcacactcgggcccgt

SEQ ID NO: 25447 - DNA, 19 bp, Homo sapiens
tcagtcacactcgggcccg

SEQ ID NO: 25448 - DNA, 19 bp, Homo sapiens
tccagtcacactcgggccc

SEQ ID NO: 25449 - DNA, 19 bp, Homo sapiens
taccagtcacactcgggcc

SEQ ID NO: 25450 - DNA, 19 bp, Homo sapiens
tcaccagtcacactcgggc

SEQ ID NO: 25451 - DNA, 19 bp, Homo sapiens
tccaccagtcacactcggg

SEQ ID NO: 25452 - DNA, 19 bp, Homo sapiens
tcccaccagtcacactcgg

SEQ ID NO: 25453 - DNA, 19 bp, Homo sapiens
tgcccaccagtcacactcg

SEQ ID NO: 25454 - DNA, 19 bp, Homo sapiens
tcgcccaccagtcacactc

SEQ ID NO: 25455 - DNA, 19 bp, Homo sapiens
tgcgcccaccagtcacact

SEQ ID NO: 25456 - DNA, 19 bp, Homo sapiens
tagcgcccaccagtcacac

SEQ ID NO: 25457 - DNA, 19 bp, Homo sapiens
tcagcgcccaccagtcaca

SEQ ID NO: 25458 - DNA, 19 bp, Homo sapiens
tccagcgcccaccagtcac

SEQ ID NO: 25459 - DNA, 19 bp, Homo sapiens
tcccagcgcccaccagtca

SEQ ID NO: 25460 - DNA, 19 bp, Homo sapiens
tacccagcgcccaccagtc

SEQ ID NO: 25461 - DNA, 19 bp, Homo sapiens
tcacccagcgcccaccagt

SEQ ID NO: 25462 - DNA, 19 bp, Homo sapiens
ttacacccagcgcccacca

SEQ ID NO: 25463 - DNA, 19 bp, Homo sapiens
tatacacccagcgcccacc

SEQ ID NO: 25464 - DNA, 19 bp, Homo sapiens
taatacacccagcgcccac

SEQ ID NO: 25465 - DNA, 19 bp, Homo sapiens
tgaatacacccagcgccca

SEQ ID NO: 25466 - DNA, 19 bp, Homo sapiens
tcgaatacacccagcgccc

SEQ ID NO: 25467 - DNA, 19 bp, Homo sapiens
tgcgaatacacccagcgcc

SEQ ID NO: 25468 - DNA, 19 bp, Homo sapiens
tggcgaatacacccagcgc

SEQ ID NO: 25469 - DNA, 19 bp, Homo sapiens
ttaggcgaatacacccagc

SEQ ID NO: 25470 - DNA, 19 bp, Homo sapiens
tataggcgaatacacccag

SEQ ID NO: 25471 - DNA, 19 bp, Homo sapiens
ttttcataggcgaatacac

SEQ ID NO: 25472 - DNA, 19 bp, Homo sapiens
tatttcataggcgaataca

SEQ ID NO: 25473 - DNA, 19 bp, Homo sapiens
tcatttcataggcgaatac

SEQ ID NO: 25474 - DNA, 19 bp, Homo sapiens
tacatttcataggcgaata

SEQ ID NO: 25475 - DNA, 19 bp, Homo sapiens
taacatttcataggcgaat

SEQ ID NO: 25476 - DNA, 19 bp, Homo sapiens
tgaacatttcataggcgaa

SEQ ID NO: 25477 - DNA, 19 bp, Homo sapiens
ttagaacatttcataggcg

SEQ ID NO: 25478 - DNA, 19 bp, Homo sapiens
tatagaacatttcataggc

SEQ ID NO: 25479 - DNA, 19 bp, Homo sapiens
tcatagaacatttcatagg

SEQ ID NO: 25480 - DNA, 19 bp, Homo sapiens
tccatagaacatttcatag

SEQ ID NO: 25481 - DNA, 19 bp, Homo sapiens
tcccatagaacatttcata

SEQ ID NO: 25482 - DNA, 19 bp, Homo sapiens
ttgcccatagaacatttca

SEQ ID NO: 25483 - DNA, 19 bp, Homo sapiens
ttctgcccatagaacattt

SEQ ID NO: 25484 - DNA, 19 bp, Homo sapiens
tgtctgcccatagaacatt

SEQ ID NO: 25485 - DNA, 19 bp, Homo sapiens
tcgtctgcccatagaacat

SEQ ID NO: 25486 - DNA, 19 bp, Homo sapiens
tgcgtctgcccatagaaca

SEQ ID NO: 25487 - DNA, 19 bp, Homo sapiens
tggcgtctgcccatagaac

SEQ ID NO: 25488 - DNA, 19 bp, Homo sapiens
tgggcgtctgcccatagaa

SEQ ID NO: 25489 - DNA, 19 bp, Homo sapiens
tagggcgtctgcccataga

SEQ ID NO: 25490 - DNA, 19 bp, Homo sapiens
taagggcgtctgcccatag

SEQ ID NO: 25491 - DNA, 19 bp, Homo sapiens
tgaagggcgtctgcccata

SEQ ID NO: 25492 - DNA, 19 bp, Homo sapiens
ttagaagggcgtctgccca

SEQ ID NO: 25493 - DNA, 19 bp, Homo sapiens
tgtagaagggcgtctgccc

SEQ ID NO: 25494 - DNA, 19 bp, Homo sapiens
tcgtagaagggcgtctgcc

SEQ ID NO: 25495 - DNA, 19 bp, Homo sapiens
tgcgtagaagggcgtctgc

SEQ ID NO: 25496 - DNA, 19 bp, Homo sapiens
tcgcgtagaagggcgtctg

SEQ ID NO: 25497 - DNA, 19 bp, Homo sapiens
ttccgcgtagaagggcgtc

SEQ ID NO: 25498 - DNA, 19 bp, Homo sapiens
tatccgcgtagaagggcgt

SEQ ID NO: 25499 - DNA, 19 bp, Homo sapiens
taatccgcgtagaagggcg

SEQ ID NO: 25500 - DNA, 19 bp, Homo sapiens
tgaatccgcgtagaagggc

SEQ ID NO: 25501 - DNA, 19 bp, Homo sapiens
ttggaatccgcgtagaagg

SEQ ID NO: 25502 - DNA, 19 bp, Homo sapiens
tgtggaatccgcgtagaag

SEQ ID NO: 25503 - DNA, 19 bp, Homo sapiens
tcgtggaatccgcgtagaa

SEQ ID NO: 25504 - DNA, 19 bp, Homo sapiens
tccgtggaatccgcgtaga

SEQ ID NO: 25505 - DNA, 19 bp, Homo sapiens
tgccgtggaatccgcgtag

SEQ ID NO: 25506 - DNA, 19 bp, Homo sapiens
tcgccgtggaatccgcgta

SEQ ID NO: 25507 - DNA, 19 bp, Homo sapiens
ttccgccgtggaatccgcg

SEQ ID NO: 25508 - DNA, 19 bp, Homo sapiens
ttctccgccgtggaatccg

SEQ ID NO: 25509 - DNA, 19 bp, Homo sapiens
tgtctccgccgtggaatcc

SEQ ID NO: 25510 - DNA, 19 bp, Homo sapiens
tggtctccgccgtggaatc

SEQ ID NO: 25511 - DNA, 19 bp, Homo sapiens
ttaggtctccgccgtggaa

SEQ ID NO: 25512 - DNA, 19 bp, Homo sapiens
tataggtctccgccgtgga

SEQ ID NO: 25513 - DNA, 19 bp, Homo sapiens
tcataggtctccgccgtgg

SEQ ID NO: 25514 - DNA, 19 bp, Homo sapiens
tccataggtctccgccgtg

SEQ ID NO: 25515 - DNA, 19 bp, Homo sapiens
tttgccataggtctccgcc

SEQ ID NO: 25516 - DNA, 19 bp, Homo sapiens
ttcttgccataggtctccg

SEQ ID NO: 25517 - DNA, 19 bp, Homo sapiens
tatcttgccataggtctcc

SEQ ID NO: 25518 - DNA, 19 bp, Homo sapiens
tgatcttgccataggtctc

SEQ ID NO: 25519 - DNA, 19 bp, Homo sapiens
tcgatcttgccataggtct

SEQ ID NO: 25520 - DNA, 19 bp, Homo sapiens
tacgatcttgccataggtc

SEQ ID NO: 25521 - DNA, 19 bp, Homo sapiens
tgacgatcttgccataggt

SEQ ID NO: 25522 - DNA, 19 bp, Homo sapiens
ttggacgatcttgccatag

SEQ ID NO: 25523 - DNA, 19 bp, Homo sapiens
tgtggacgatcttgccata

SEQ ID NO: 25524 - DNA, 19 bp, Homo sapiens
ttagtggacgatcttgcca

SEQ ID NO: 25525 - DNA, 19 bp, Homo sapiens
tttgtagtggacgatcttg

SEQ ID NO: 25526 - DNA, 19 bp, Homo sapiens
tcttgtagtggacgatctt

SEQ ID NO: 25527 - DNA, 19 bp, Homo sapiens
ttccttgtagtggacgatc

SEQ ID NO: 25528 - DNA, 19 bp, Homo sapiens
tctccttgtagtggacgat

SEQ ID NO: 25529 - DNA, 19 bp, Homo sapiens
ttgctccttgtagtggacg

SEQ ID NO: 25530 - DNA, 19 bp, Homo sapiens
tgtgctccttgtagtggac

SEQ ID NO: 25531 - DNA, 19 bp, Homo sapiens
tggtgctccttgtagtgga

SEQ ID NO: 25532 - DNA, 19 bp, Homo sapiens
taggtgctccttgtagtgg

SEQ ID NO: 25533 - DNA, 19 bp, Homo sapiens
tgaggtgctccttgtagtg

SEQ ID NO: 25534 - DNA, 19 bp, Homo sapiens
tagaggtgctccttgtagt

SEQ ID NO: 25535 - DNA, 19 bp, Homo sapiens
tgagaggtgctccttgtag

SEQ ID NO: 25536 - DNA, 19 bp, Homo sapiens
tagagaggtgctccttgta

SEQ ID NO: 25537 - DNA, 19 bp, Homo sapiens
tgagagaggtgctccttgt

SEQ ID NO: 25538 - DNA, 19 bp, Homo sapiens
tagagagaggtgctccttg

SEQ ID NO: 25539 - DNA, 19 bp, Homo sapiens
tcagagagaggtgctcctt

SEQ ID NO: 25540 - DNA, 19 bp, Homo sapiens
tgcagagagaggtgctcct

SEQ ID NO: 25541 - DNA, 19 bp, Homo sapiens
tggcagagagaggtgctcc

SEQ ID NO: 25542 - DNA, 19 bp, Homo sapiens
tcggcagagagaggtgctc

SEQ ID NO: 25543 - DNA, 19 bp, Homo sapiens
tgcggcagagagaggtgct

SEQ ID NO: 25544 - DNA, 19 bp, Homo sapiens
tagcggcagagagaggtgc

SEQ ID NO: 25545 - DNA, 19 bp, Homo sapiens
tcagcggcagagagaggtg

SEQ ID NO: 25546 - DNA, 19 bp, Homo sapiens
tccagcggcagagagaggt

SEQ ID NO: 25547 - DNA, 19 bp, Homo sapiens
taccagcggcagagagagg

SEQ ID NO: 25548 - DNA, 19 bp, Homo sapiens
tcaccagcggcagagagag

SEQ ID NO: 25549 - DNA, 19 bp, Homo sapiens
ttccaccagcggcagagag

SEQ ID NO: 25550 - DNA, 19 bp, Homo sapiens
tgtccaccagcggcagaga

SEQ ID NO: 25551 - DNA, 19 bp, Homo sapiens
tttcgtccaccagcggcag

SEQ ID NO: 25552 - DNA, 19 bp, Homo sapiens
tcttcgtccaccagcggca

SEQ ID NO: 25553 - DNA, 19 bp, Homo sapiens
tccttcgtccaccagcggc

SEQ ID NO: 25554 - DNA, 19 bp, Homo sapiens
tcccttcgtccaccagcgg

SEQ ID NO: 25555 - DNA, 19 bp, Homo sapiens
tccccttcgtccaccagcg

SEQ ID NO: 25556 - DNA, 19 bp, Homo sapiens
taccccttcgtccaccagc

SEQ ID NO: 25557 - DNA, 19 bp, Homo sapiens
tgaccccttcgtccaccag

SEQ ID NO: 25558 - DNA, 19 bp, Homo sapiens
tggaccccttcgtccacca

SEQ ID NO: 25559 - DNA, 19 bp, Homo sapiens
tgggaccccttcgtccacc

SEQ ID NO: 25560 - DNA, 19 bp, Homo sapiens
tagggaccccttcgtccac

SEQ ID NO: 25561 - DNA, 19 bp, Homo sapiens
ttcagggaccccttcgtcc

SEQ ID NO: 25562 - DNA, 19 bp, Homo sapiens
tctcagggaccccttcgtc

SEQ ID NO: 25563 - DNA, 19 bp, Homo sapiens
ttcctcagggaccccttcg

SEQ ID NO: 25564 - DNA, 19 bp, Homo sapiens
tctcctcagggaccccttc

SEQ ID NO: 25565 - DNA, 19 bp, Homo sapiens
tcctcctcagggacccctt

SEQ ID NO: 25566 - DNA, 19 bp, Homo sapiens
tgcctcctcagggacccct

SEQ ID NO: 25567 - DNA, 19 bp, Homo sapiens
tagcctcctcagggacccc

SEQ ID NO: 25568 - DNA, 19 bp, Homo sapiens
tgagcctcctcagggaccc

SEQ ID NO: 25569 - DNA, 19 bp, Homo sapiens
ttcgagcctcctcagggac

SEQ ID NO: 25570 - DNA, 19 bp, Homo sapiens
ttctcgagcctcctcaggg

SEQ ID NO: 25571 - DNA, 19 bp, Homo sapiens
tgtctcgagcctcctcagg

SEQ ID NO: 25572 - DNA, 19 bp, Homo sapiens
tagtctcgagcctcctcag

SEQ ID NO: 25573 - DNA, 19 bp, Homo sapiens
taagtctcgagcctcctca

SEQ ID NO: 25574 - DNA, 19 bp, Homo sapiens
ttgaagtctcgagcctcct

SEQ ID NO: 25575 - DNA, 19 bp, Homo sapiens
tatgaagtctcgagcctcc

SEQ ID NO: 25576 - DNA, 19 bp, Homo sapiens
taatgaagtctcgagcctc

SEQ ID NO: 25577 - DNA, 19 bp, Homo sapiens
ttgaatgaagtctcgagcc

SEQ ID NO: 25578 - DNA, 19 bp, Homo sapiens
tctgaatgaagtctcgagc

SEQ ID NO: 25579 - DNA, 19 bp, Homo sapiens
tgctgaatgaagtctcgag

SEQ ID NO: 25580 - DNA, 19 bp, Homo sapiens
tcgctgaatgaagtctcga

SEQ ID NO: 25581 - DNA, 19 bp, Homo sapiens
tccgctgaatgaagtctcg

SEQ ID NO: 25582 - DNA, 19 bp, Homo sapiens
taccgctgaatgaagtctc

SEQ ID NO: 25583 - DNA, 19 bp, Homo sapiens
taaccgctgaatgaagtct

SEQ ID NO: 25584 - DNA, 19 bp, Homo sapiens
tcaaccgctgaatgaagtc

SEQ ID NO: 25585 - DNA, 19 bp, Homo sapiens
tgcaaccgctgaatgaagt

SEQ ID NO: 25586 - DNA, 19 bp, Homo sapiens
tagcaaccgctgaatgaag

SEQ ID NO: 25587 - DNA, 19 bp, Homo sapiens
tcagcaaccgctgaatgaa

SEQ ID NO: 25588 - DNA, 19 bp, Homo sapiens
tacagcaaccgctgaatga

SEQ ID NO: 25589 - DNA, 19 bp, Homo sapiens
tcacagcaaccgctgaatg

SEQ ID NO: 25590 - DNA, 19 bp, Homo sapiens
tacacagcaaccgctgaat

SEQ ID NO: 25591 - DNA, 19 bp, Homo sapiens
tgacacagcaaccgctgaa

SEQ ID NO: 25592 - DNA, 19 bp, Homo sapiens
tggacacagcaaccgctga

SEQ ID NO: 25593 - DNA, 19 bp, Homo sapiens
tgggacacagcaaccgctg

SEQ ID NO: 25594 - DNA, 19 bp, Homo sapiens
tggggacacagcaaccgct

SEQ ID NO: 25595 - DNA, 19 bp, Homo sapiens
tgggggacacagcaaccgc

SEQ ID NO: 25596 - DNA, 19 bp, Homo sapiens
tcgggggacacagcaaccg

SEQ ID NO: 25597 - DNA, 19 bp, Homo sapiens
ttccgggggacacagcaac

SEQ ID NO: 25598 - DNA, 19 bp, Homo sapiens
ttctccgggggacacagca

SEQ ID NO: 25599 - DNA, 19 bp, Homo sapiens
ttgtctccgggggacacag

SEQ ID NO: 25600 - DNA, 19 bp, Homo sapiens
tgtgtctccgggggacaca

SEQ ID NO: 25601 - DNA, 19 bp, Homo sapiens
tcgtgtctccgggggacac

SEQ ID NO: 25602 - DNA, 19 bp, Homo sapiens
tccgtgtctccgggggaca

SEQ ID NO: 25603 - DNA, 19 bp, Homo sapiens
tgccgtgtctccgggggac

SEQ ID NO: 25604 - DNA, 19 bp, Homo sapiens
tagccgtgtctccggggga

SEQ ID NO: 25605 - DNA, 19 bp, Homo sapiens
tcagccgtgtctccggggg

SEQ ID NO: 25606 - DNA, 19 bp, Homo sapiens
tccagccgtgtctccgggg

SEQ ID NO: 25607 - DNA, 19 bp, Homo sapiens
tcccagccgtgtctccggg

SEQ ID NO: 25608 - DNA, 19 bp, Homo sapiens
tgcccagccgtgtctccgg

SEQ ID NO: 25609 - DNA, 19 bp, Homo sapiens
tggcccagccgtgtctccg

SEQ ID NO: 25610 - DNA, 19 bp, Homo sapiens
tcggcccagccgtgtctcc

SEQ ID NO: 25611 - DNA, 19 bp, Homo sapiens
tccggcccagccgtgtctc

SEQ ID NO: 25612 - DNA, 19 bp, Homo sapiens
tcccggcccagccgtgtct

SEQ ID NO: 25613 - DNA, 19 bp, Homo sapiens
tccccggcccagccgtgtc

SEQ ID NO: 25614 - DNA, 19 bp, Homo sapiens
taccccggcccagccgtgt

SEQ ID NO: 25615 - DNA, 19 bp, Homo sapiens
tcaccccggcccagccgtg

SEQ ID NO: 25616 - DNA, 19 bp, Homo sapiens
ttccaccccggcccagccg

SEQ ID NO: 25617 - DNA, 19 bp, Homo sapiens
tctccaccccggcccagcc

SEQ ID NO: 25618 - DNA, 19 bp, Homo sapiens
ttgctccaccccggcccag

SEQ ID NO: 25619 - DNA, 19 bp, Homo sapiens
tctgctccaccccggccca

SEQ ID NO: 25620 - DNA, 19 bp, Homo sapiens
tcctgctccaccccggccc

SEQ ID NO: 25621 - DNA, 19 bp, Homo sapiens
tgcctgctccaccccggcc

SEQ ID NO: 25622 - DNA, 19 bp, Homo sapiens
ttcgcctgctccaccccgg

SEQ ID NO: 25623 - DNA, 19 bp, Homo sapiens
tgtcgcctgctccaccccg

SEQ ID NO: 25624 - DNA, 19 bp, Homo sapiens
tagtcgcctgctccacccc

SEQ ID NO: 25625 - DNA, 19 bp, Homo sapiens
taagtcgcctgctccaccc

SEQ ID NO: 25626 - DNA, 19 bp, Homo sapiens
tgaagtcgcctgctccacc

SEQ ID NO: 25627 - DNA, 19 bp, Homo sapiens
tggaagtcgcctgctccac

SEQ ID NO: 25628 - DNA, 19 bp, Homo sapiens
tcggaagtcgcctgctcca

SEQ ID NO: 25629 - DNA, 19 bp, Homo sapiens
ttccggaagtcgcctgctc

SEQ ID NO: 25630 - DNA, 19 bp, Homo sapiens
ttgtccggaagtcgcctgc

SEQ ID NO: 25631 - DNA, 19 bp, Homo sapiens
ttgtgtccggaagtcgcct

SEQ ID NO: 25632 - DNA, 19 bp, Homo sapiens
tatgtgtccggaagtcgcc

SEQ ID NO: 25633 - DNA, 19 bp, Homo sapiens
tgatgtgtccggaagtcgc

SEQ ID NO: 25634 - DNA, 19 bp, Homo sapiens
tggatgtgtccggaagtcg

SEQ ID NO: 25635 - DNA, 19 bp, Homo sapiens
tgggatgtgtccggaagtc

SEQ ID NO: 25636 - DNA, 19 bp, Homo sapiens
tagggatgtgtccggaagt

SEQ ID NO: 25637 - DNA, 19 bp, Homo sapiens
taagggatgtgtccggaag

SEQ ID NO: 25638 - DNA, 19 bp, Homo sapiens
tgaagggatgtgtccggaa

SEQ ID NO: 25639 - DNA, 19 bp, Homo sapiens
tagaagggatgtgtccgga

SEQ ID NO: 25640 - DNA, 19 bp, Homo sapiens
taagaagggatgtgtccgg

SEQ ID NO: 25641 - DNA, 19 bp, Homo sapiens
tgaagaagggatgtgtccg

SEQ ID NO: 25642 - DNA, 19 bp, Homo sapiens
tagaagaagggatgtgtcc

SEQ ID NO: 25643 - DNA, 19 bp, Homo sapiens
taagaagaagggatgtgtc

SEQ ID NO: 25644 - DNA, 19 bp, Homo sapiens
taaagaagaagggatgtgt

SEQ ID NO: 25645 - DNA, 19 bp, Homo sapiens
tcaaagaagaagggatgtg

SEQ ID NO: 25646 - DNA, 19 bp, Homo sapiens
tccaaagaagaagggatgt

SEQ ID NO: 25647 - DNA, 19 bp, Homo sapiens
tgccaaagaagaagggatg

SEQ ID NO: 25648 - DNA, 19 bp, Homo sapiens
tggccaaagaagaagggat

SEQ ID NO: 25649 - DNA, 19 bp, Homo sapiens
taggccaaagaagaaggga

SEQ ID NO: 25650 - DNA, 19 bp, Homo sapiens
tgaggccaaagaagaaggg

SEQ ID NO: 25651 - DNA, 19 bp, Homo sapiens
ttcgaggccaaagaagaag

SEQ ID NO: 25652 - DNA, 19 bp, Homo sapiens
tgtcgaggccaaagaagaa

SEQ ID NO: 25653 - DNA, 19 bp, Homo sapiens
tagtcgaggccaaagaaga

SEQ ID NO: 25654 - DNA, 19 bp, Homo sapiens
tcagtcgaggccaaagaag

SEQ ID NO: 25655 - DNA, 19 bp, Homo sapiens
tccagtcgaggccaaagaa

SEQ ID NO: 25656 - DNA, 19 bp, Homo sapiens
ttcccagtcgaggccaaag

SEQ ID NO: 25657 - DNA, 19 bp, Homo sapiens
tatcccagtcgaggccaaa

SEQ ID NO: 25658 - DNA, 19 bp, Homo sapiens
tcatcccagtcgaggccaa

SEQ ID NO: 25659 - DNA, 19 bp, Homo sapiens
tccatcccagtcgaggcca

SEQ ID NO: 25660 - DNA, 19 bp, Homo sapiens
taccatcccagtcgaggcc

SEQ ID NO: 25661 - DNA, 19 bp, Homo sapiens
tgaccatcccagtcgaggc

SEQ ID NO: 25662 - DNA, 19 bp, Homo sapiens
tagaccatcccagtcgagg

SEQ ID NO: 25663 - DNA, 19 bp, Homo sapiens
tgagaccatcccagtcgag

SEQ ID NO: 25664 - DNA, 19 bp, Homo sapiens
tggagaccatcccagtcga

SEQ ID NO: 25665 - DNA, 19 bp, Homo sapiens
tcggagaccatcccagtcg

SEQ ID NO: 25666 - DNA, 19 bp, Homo sapiens
tccggagaccatcccagtc

SEQ ID NO: 25667 - DNA, 19 bp, Homo sapiens
ttcccggagaccatcccag

SEQ ID NO: 25668 - DNA, 19 bp, Homo sapiens
ttgtcccggagaccatccc

SEQ ID NO: 25669 - DNA, 19 bp, Homo sapiens
tctgtcccggagaccatcc

SEQ ID NO: 25670 - DNA, 19 bp, Homo sapiens
tgctgtcccggagaccatc

SEQ ID NO: 25671 - DNA, 19 bp, Homo sapiens
tcgctgtcccggagaccat

SEQ ID NO: 25672 - DNA, 19 bp, Homo sapiens
tacgctgtcccggagacca

SEQ ID NO: 25673 - DNA, 19 bp, Homo sapiens
tcacgctgtcccggagacc

SEQ ID NO: 25674 - DNA, 19 bp, Homo sapiens
tgcacgctgtcccggagac

SEQ ID NO: 25675 - DNA, 19 bp, Homo sapiens
tggcacgctgtcccggaga

SEQ ID NO: 25676 - DNA, 19 bp, Homo sapiens
tgggcacgctgtcccggag

SEQ ID NO: 25677 - DNA, 19 bp, Homo sapiens
tggggcacgctgtcccgga

SEQ ID NO: 25678 - DNA, 19 bp, Homo sapiens
tgggggcacgctgtcccgg

SEQ ID NO: 25679 - DNA, 19 bp, Homo sapiens
tggggggcacgctgtcccg

SEQ ID NO: 25680 - DNA, 19 bp, Homo sapiens
taggggggcacgctgtccc

SEQ ID NO: 25681 - DNA, 19 bp, Homo sapiens
taaggggggcacgctgtcc

SEQ ID NO: 25682 - DNA, 19 bp, Homo sapiens
ttaaaggggggcacgctgt

SEQ ID NO: 25683 - DNA, 19 bp, Homo sapiens
ttgtaaaggggggcacgct

SEQ ID NO: 25684 - DNA, 19 bp, Homo sapiens
tgtgtaaaggggggcacgc

SEQ ID NO: 25685 - DNA, 19 bp, Homo sapiens
tggtgtaaaggggggcacg

SEQ ID NO: 25686 - DNA, 19 bp, Homo sapiens
tcggtgtaaaggggggcac

SEQ ID NO: 25687 - DNA, 19 bp, Homo sapiens
ttccggtgtaaaggggggc

SEQ ID NO: 25688 - DNA, 19 bp, Homo sapiens
tatccggtgtaaagggggg

SEQ ID NO: 25689 - DNA, 19 bp, Homo sapiens
taatccggtgtaaaggggg

SEQ ID NO: 25690 - DNA, 19 bp, Homo sapiens
taaatccggtgtaaagggg

SEQ ID NO: 25691 - DNA, 19 bp, Homo sapiens
tgaaatccggtgtaaaggg

SEQ ID NO: 25692 - DNA, 19 bp, Homo sapiens
tttcgaaatccggtgtaaa

SEQ ID NO: 25693 - DNA, 19 bp, Homo sapiens
tcttcgaaatccggtgtaa

SEQ ID NO: 25694 - DNA, 19 bp, Homo sapiens
tccttcgaaatccggtgta

SEQ ID NO: 25695 - DNA, 19 bp, Homo sapiens
taccttcgaaatccggtgt

SEQ ID NO: 25696 - DNA, 19 bp, Homo sapiens
tcaccttcgaaatccggtg

SEQ ID NO: 25697 - DNA, 19 bp, Homo sapiens
tgcaccttcgaaatccggt

SEQ ID NO: 25698 - DNA, 19 bp, Homo sapiens
ttggcaccttcgaaatccg

SEQ ID NO: 25699 - DNA, 19 bp, Homo sapiens
tgtggcaccttcgaaatcc

SEQ ID NO: 25700 - DNA, 19 bp, Homo sapiens
tggtggcaccttcgaaatc

SEQ ID NO: 25701 - DNA, 19 bp, Homo sapiens
ttcggtggcaccttcgaaa

SEQ ID NO: 25702 - DNA, 19 bp, Homo sapiens
ttgtcggtggcaccttcga

SEQ ID NO: 25703 - DNA, 19 bp, Homo sapiens
ttgtgtcggtggcaccttc

SEQ ID NO: 25704 - DNA, 19 bp, Homo sapiens
tatgtgtcggtggcacctt

SEQ ID NO: 25705 - DNA, 19 bp, Homo sapiens
tcatgtgtcggtggcacct

SEQ ID NO: 25706 - DNA, 19 bp, Homo sapiens
tttgcatgtgtcggtggca

SEQ ID NO: 25707 - DNA, 19 bp, Homo sapiens
tgttgcatgtgtcggtggc

SEQ ID NO: 25708 - DNA, 19 bp, Homo sapiens
tagttgcatgtgtcggtgg

SEQ ID NO: 25709 - DNA, 19 bp, Homo sapiens
taagttgcatgtgtcggtg

SEQ ID NO: 25710 - DNA, 19 bp, Homo sapiens
tgaagttgcatgtgtcggt

SEQ ID NO: 25711 - DNA, 19 bp, Homo sapiens
ttcgaagttgcatgtgtcg

SEQ ID NO: 25712 - DNA, 19 bp, Homo sapiens
tgtcgaagttgcatgtgtc

SEQ ID NO: 25713 - DNA, 19 bp, Homo sapiens
tagtcgaagttgcatgtgt

SEQ ID NO: 25714 - DNA, 19 bp, Homo sapiens
taagtcgaagttgcatgtg

SEQ ID NO: 25715 - DNA, 19 bp, Homo sapiens
tcaagtcgaagttgcatgt

SEQ ID NO: 25716 - DNA, 19 bp, Homo sapiens
tccaagtcgaagttgcatg

SEQ ID NO: 25717 - DNA, 19 bp, Homo sapiens
taccaagtcgaagttgcat

SEQ ID NO: 25718 - DNA, 19 bp, Homo sapiens
tcaccaagtcgaagttgca

SEQ ID NO: 25719 - DNA, 19 bp, Homo sapiens
ttccaccaagtcgaagttg

SEQ ID NO: 25720 - DNA, 19 bp, Homo sapiens
tctccaccaagtcgaagtt

SEQ ID NO: 25721 - DNA, 19 bp, Homo sapiens
ttcctccaccaagtcgaag

SEQ ID NO: 25722 - DNA, 19 bp, Homo sapiens
tgtcctccaccaagtcgaa

SEQ ID NO: 25723 - DNA, 19 bp, Homo sapiens
tcgtcctccaccaagtcga

SEQ ID NO: 25724 - DNA, 19 bp, Homo sapiens
tccgtcctccaccaagtcg

SEQ ID NO: 25725 - DNA, 19 bp, Homo sapiens
tcccgtcctccaccaagtc

SEQ ID NO: 25726 - DNA, 19 bp, Homo sapiens
tgcccgtcctccaccaagt

SEQ ID NO: 25727 - DNA, 19 bp, Homo sapiens
tagcccgtcctccaccaag

SEQ ID NO: 25728 - DNA, 19 bp, Homo sapiens
ttgagcccgtcctccacca

SEQ ID NO: 25729 - DNA, 19 bp, Homo sapiens
tgtgagcccgtcctccacc

SEQ ID NO: 25730 - DNA, 19 bp, Homo sapiens
tagtgagcccgtcctccac

SEQ ID NO: 25731 - DNA, 19 bp, Homo sapiens
tcagtgagcccgtcctcca

SEQ ID NO: 25732 - DNA, 19 bp, Homo sapiens
tgcagtgagcccgtcctcc

SEQ ID NO: 25733 - DNA, 19 bp, Homo sapiens
ttggcagtgagcccgtcct

SEQ ID NO: 25734 - DNA, 19 bp, Homo sapiens
tatggcagtgagcccgtcc

SEQ ID NO: 25735 - DNA, 19 bp, Homo sapiens
tcatggcagtgagcccgtc

SEQ ID NO: 25736 - DNA, 19 bp, Homo sapiens
ttccatggcagtgagcccg

SEQ ID NO: 25737 - DNA, 19 bp, Homo sapiens
ttctccatggcagtgagcc

SEQ ID NO: 25738 - DNA, 19 bp, Homo sapiens
ttgtctccatggcagtgag

SEQ ID NO: 25739 - DNA, 19 bp, Homo sapiens
tgtgtctccatggcagtga

SEQ ID NO: 25740 - DNA, 19 bp, Homo sapiens
tagtgtctccatggcagtg

SEQ ID NO: 25741 - DNA, 19 bp, Homo sapiens
tcagtgtctccatggcagt

SEQ ID NO: 25742 - DNA, 19 bp, Homo sapiens
tacagtgtctccatggcag

SEQ ID NO: 25743 - DNA, 19 bp, Homo sapiens
tgacagtgtctccatggca

SEQ ID NO: 25744 - DNA, 19 bp, Homo sapiens
tcgacagtgtctccatggc

SEQ ID NO: 25745 - DNA, 19 bp, Homo sapiens
ttccgacagtgtctccatg

SEQ ID NO: 25746 - DNA, 19 bp, Homo sapiens
ttgtccgacagtgtctcca

SEQ ID NO: 25747 - DNA, 19 bp, Homo sapiens
tatgtccgacagtgtctcc

SEQ ID NO: 25748 - DNA, 19 bp, Homo sapiens
taatgtccgacagtgtctc

SEQ ID NO: 25749 - DNA, 19 bp, Homo sapiens
tgaatgtccgacagtgtct

SEQ ID NO: 25750 - DNA, 19 bp, Homo sapiens
tcgaatgtccgacagtgtc

SEQ ID NO: 25751 - DNA, 19 bp, Homo sapiens
tccgaatgtccgacagtgt

SEQ ID NO: 25752 - DNA, 19 bp, Homo sapiens
tttcccgaatgtccgacag

SEQ ID NO: 25753 - DNA, 19 bp, Homo sapiens
tcttcccgaatgtccgaca

SEQ ID NO: 25754 - DNA, 19 bp, Homo sapiens
tccttcccgaatgtccgac

SEQ ID NO: 25755 - DNA, 19 bp, Homo sapiens
taccttcccgaatgtccga

SEQ ID NO: 25756 - DNA, 19 bp, Homo sapiens
tcaccttcccgaatgtccg

SEQ ID NO: 25757 - DNA, 19 bp, Homo sapiens
tgcaccttcccgaatgtcc

SEQ ID NO: 25758 - DNA, 19 bp, Homo sapiens
tcgcaccttcccgaatgtc

SEQ ID NO: 25759 - DNA, 19 bp, Homo sapiens
tgcgcaccttcccgaatgt

SEQ ID NO: 25760 - DNA, 19 bp, Homo sapiens
tggcgcaccttcccgaatg

SEQ ID NO: 25761 - DNA, 19 bp, Homo sapiens
tcggcgcaccttcccgaat

SEQ ID NO: 25762 - DNA, 19 bp, Homo sapiens
tgcggcgcaccttcccgaa

SEQ ID NO: 25763 - DNA, 19 bp, Homo sapiens
ttagcggcgcaccttcccg

SEQ ID NO: 25764 - DNA, 19 bp, Homo sapiens
tctagcggcgcaccttccc

SEQ ID NO: 25765 - DNA, 19 bp, Homo sapiens
tcctagcggcgcaccttcc

SEQ ID NO: 25766 - DNA, 19 bp, Homo sapiens
tccctagcggcgcaccttc

SEQ ID NO: 25767 - DNA, 19 bp, Homo sapiens
tcccctagcggcgcacctt

SEQ ID NO: 25768 - DNA, 19 bp, Homo sapiens
tacccctagcggcgcacct

SEQ ID NO: 25769 - DNA, 19 bp, Homo sapiens
tgacccctagcggcgcacc

SEQ ID NO: 25770 - DNA, 19 bp, Homo sapiens
ttggacccctagcggcgca

SEQ ID NO: 25771 - DNA, 19 bp, Homo sapiens
tgtggacccctagcggcgc

SEQ ID NO: 25772 - DNA, 19 bp, Homo sapiens
tggtggacccctagcggcg

SEQ ID NO: 25773 - DNA, 19 bp, Homo sapiens
taggtggacccctagcggc

SEQ ID NO: 25774 - DNA, 19 bp, Homo sapiens
tcaggtggacccctagcgg

SEQ ID NO: 25775 - DNA, 19 bp, Homo sapiens
tgcaggtggacccctagcg

SEQ ID NO: 25776 - DNA, 19 bp, Homo sapiens
tggcaggtggacccctagc

SEQ ID NO: 25777 - DNA, 19 bp, Homo sapiens
taggcaggtggacccctag

SEQ ID NO: 25778 - DNA, 19 bp, Homo sapiens
taaggcaggtggaccccta

SEQ ID NO: 25779 - DNA, 19 bp, Homo sapiens
taaaggcaggtggacccct

SEQ ID NO: 25780 - DNA, 19 bp, Homo sapiens
taaaaggcaggtggacccc

SEQ ID NO: 25781 - DNA, 19 bp, Homo sapiens
tcaaaaggcaggtggaccc

SEQ ID NO: 25782 - DNA, 19 bp, Homo sapiens
tacaaaaggcaggtggacc

SEQ ID NO: 25783 - DNA, 19 bp, Homo sapiens
tcacaaaaggcaggtggac

SEQ ID NO: 25784 - DNA, 19 bp, Homo sapiens
tccacaaaaggcaggtgga

SEQ ID NO: 25785 - DNA, 19 bp, Homo sapiens
tcccacaaaaggcaggtgg

SEQ ID NO: 25786 - DNA, 19 bp, Homo sapiens
tgcccacaaaaggcaggtg

SEQ ID NO: 25787 - DNA, 19 bp, Homo sapiens
ttagcccacaaaaggcagg

SEQ ID NO: 25788 - DNA, 19 bp, Homo sapiens
tgtagcccacaaaaggcag

SEQ ID NO: 25789 - DNA, 19 bp, Homo sapiens
tagtagcccacaaaaggca

SEQ ID NO: 25790 - DNA, 19 bp, Homo sapiens
tgagtagcccacaaaaggc

SEQ ID NO: 25791 - DNA, 19 bp, Homo sapiens
tggagtagcccacaaaagg

SEQ ID NO: 25792 - DNA, 19 bp, Homo sapiens
ttaggagtagcccacaaaa

SEQ ID NO: 25793 - DNA, 19 bp, Homo sapiens
tgtaggagtagcccacaaa

SEQ ID NO: 25794 - DNA, 19 bp, Homo sapiens
tagtaggagtagcccacaa

SEQ ID NO: 25795 - DNA, 19 bp, Homo sapiens
tgagtaggagtagcccaca

SEQ ID NO: 25796 - DNA, 19 bp, Homo sapiens
tggagtaggagtagcccac

SEQ ID NO: 25797 - DNA, 19 bp, Homo sapiens
taggagtaggagtagccca

SEQ ID NO: 25798 - DNA, 19 bp, Homo sapiens
tcaggagtaggagtagccc

SEQ ID NO: 25799 - DNA, 19 bp, Homo sapiens
ttgcaggagtaggagtagc

SEQ ID NO: 25800 - DNA, 19 bp, Homo sapiens
tatgcaggagtaggagtag

SEQ ID NO: 25801 - DNA, 19 bp, Homo sapiens
tcatgcaggagtaggagta

SEQ ID NO: 25802 - DNA, 19 bp, Homo sapiens
tccatgcaggagtaggagt

SEQ ID NO: 25803 - DNA, 19 bp, Homo sapiens
tgccatgcaggagtaggag

SEQ ID NO: 25804 - DNA, 19 bp, Homo sapiens
tggccatgcaggagtagga

SEQ ID NO: 25805 - DNA, 19 bp, Homo sapiens
tgggccatgcaggagtagg

SEQ ID NO: 25806 - DNA, 19 bp, Homo sapiens
tagggccatgcaggagtag

SEQ ID NO: 25807 - DNA, 19 bp, Homo sapiens
ttgagggccatgcaggagt

SEQ ID NO: 25808 - DNA, 19 bp, Homo sapiens
tctgagggccatgcaggag

SEQ ID NO: 25809 - DNA, 19 bp, Homo sapiens
tcctgagggccatgcagga

SEQ ID NO: 25810 - DNA, 19 bp, Homo sapiens
ttccctgagggccatgcag

SEQ ID NO: 25811 - DNA, 19 bp, Homo sapiens
ttgtccctgagggccatgc

SEQ ID NO: 25812 - DNA, 19 bp, Homo sapiens
tctgtccctgagggccatg

SEQ ID NO: 25813 - DNA, 19 bp, Homo sapiens
tactgtccctgagggccat

SEQ ID NO: 25814 - DNA, 19 bp, Homo sapiens
ttcactgtccctgagggcc

SEQ ID NO: 25815 - DNA, 19 bp, Homo sapiens
tctcactgtccctgagggc

SEQ ID NO: 25816 - DNA, 19 bp, Homo sapiens
tcctcactgtccctgaggg

SEQ ID NO: 25817 - DNA, 19 bp, Homo sapiens
tacctcactgtccctgagg

SEQ ID NO: 25818 - DNA, 19 bp, Homo sapiens
tgacctcactgtccctgag

SEQ ID NO: 25819 - DNA, 19 bp, Homo sapiens
tggacctcactgtccctga

SEQ ID NO: 25820 - DNA, 19 bp, Homo sapiens
ttgggacctcactgtccct

SEQ ID NO: 25821 - DNA, 19 bp, Homo sapiens
tctgggacctcactgtccc

SEQ ID NO: 25822 - DNA, 19 bp, Homo sapiens
tcctgggacctcactgtcc

SEQ ID NO: 25823 - DNA, 19 bp, Homo sapiens
tgcctgggacctcactgtc

SEQ ID NO: 25824 - DNA, 19 bp, Homo sapiens
tggcctgggacctcactgt

SEQ ID NO: 25825 - DNA, 19 bp, Homo sapiens
tgggcctgggacctcactg

SEQ ID NO: 25826 - DNA, 19 bp, Homo sapiens
ttggggcctgggacctcac

SEQ ID NO: 25827 - DNA, 19 bp, Homo sapiens
ttgtggggcctgggacctc

SEQ ID NO: 25828 - DNA, 19 bp, Homo sapiens
tgtgtggggcctgggacct

SEQ ID NO: 25829 - DNA, 19 bp, Homo sapiens
tggtgtggggcctgggacc

SEQ ID NO: 25830 - DNA, 19 bp, Homo sapiens
ttgggtgtggggcctggga

SEQ ID NO: 25831 - DNA, 19 bp, Homo sapiens
tatgggtgtggggcctggg

SEQ ID NO: 25832 - DNA, 19 bp, Homo sapiens
tcatgggtgtggggcctgg

SEQ ID NO: 25833 - DNA, 19 bp, Homo sapiens
tttccatgggtgtggggcc

SEQ ID NO: 25834 - DNA, 19 bp, Homo sapiens
tgttccatgggtgtggggc

SEQ ID NO: 25835 - DNA, 19 bp, Homo sapiens
tagttccatgggtgtgggg

SEQ ID NO: 25836 - DNA, 19 bp, Homo sapiens
tcagttccatgggtgtggg

SEQ ID NO: 25837 - DNA, 19 bp, Homo sapiens
ttccagttccatgggtgtg

SEQ ID NO: 25838 - DNA, 19 bp, Homo sapiens
tctccagttccatgggtgt

SEQ ID NO: 25839 - DNA, 19 bp, Homo sapiens
tcctccagttccatgggtg

SEQ ID NO: 25840 - DNA, 19 bp, Homo sapiens
tgcctccagttccatgggt

SEQ ID NO: 25841 - DNA, 19 bp, Homo sapiens
tggcctccagttccatggg

SEQ ID NO: 25842 - DNA, 19 bp, Homo sapiens
ttcggcctccagttccatg

SEQ ID NO: 25843 - DNA, 19 bp, Homo sapiens
tctcggcctccagttccat

SEQ ID NO: 25844 - DNA, 19 bp, Homo sapiens
ttgctcggcctccagttcc

SEQ ID NO: 25845 - DNA, 19 bp, Homo sapiens
tctgctcggcctccagttc

SEQ ID NO: 25846 - DNA, 19 bp, Homo sapiens
tgctgctcggcctccagtt

SEQ ID NO: 25847 - DNA, 19 bp, Homo sapiens
tagctgctcggcctccagt

SEQ ID NO: 25848 - DNA, 19 bp, Homo sapiens
tcagctgctcggcctccag

SEQ ID NO: 25849 - DNA, 19 bp, Homo sapiens
tgcagctgctcggcctcca

SEQ ID NO: 25850 - DNA, 19 bp, Homo sapiens
tagcagctgctcggcctcc

SEQ ID NO: 25851 - DNA, 19 bp, Homo sapiens
taagcagctgctcggcctc

SEQ ID NO: 25852 - DNA, 19 bp, Homo sapiens
ttcaagcagctgctcggcc

SEQ ID NO: 25853 - DNA, 19 bp, Homo sapiens
tctcaagcagctgctcggc

SEQ ID NO: 25854 - DNA, 19 bp, Homo sapiens
tgctcaagcagctgctcgg

SEQ ID NO: 25855 - DNA, 19 bp, Homo sapiens
ttggctcaagcagctgctc

SEQ ID NO: 25856 - DNA, 19 bp, Homo sapiens
ttgtggctcaagcagctgc

SEQ ID NO: 25857 - DNA, 19 bp, Homo sapiens
tgtgtggctcaagcagctg

SEQ ID NO: 25858 - DNA, 19 bp, Homo sapiens
tcgtgtggctcaagcagct

SEQ ID NO: 25859 - DNA, 19 bp, Homo sapiens
tacgtgtggctcaagcagc

SEQ ID NO: 25860 - DNA, 19 bp, Homo sapiens
tcacgtgtggctcaagcag

SEQ ID NO: 25861 - DNA, 19 bp, Homo sapiens
tttgcacgtgtggctcaag

SEQ ID NO: 25862 - DNA, 19 bp, Homo sapiens
tcttgcacgtgtggctcaa

SEQ ID NO: 25863 - DNA, 19 bp, Homo sapiens
tgcttgcacgtgtggctca

SEQ ID NO: 25864 - DNA, 19 bp, Homo sapiens
tcgcttgcacgtgtggctc

SEQ ID NO: 25865 - DNA, 19 bp, Homo sapiens
tgcgcttgcacgtgtggct

SEQ ID NO: 25866 - DNA, 19 bp, Homo sapiens
tggcgcttgcacgtgtggc

SEQ ID NO: 25867 - DNA, 19 bp, Homo sapiens
ttgggcgcttgcacgtgtg

SEQ ID NO: 25868 - DNA, 19 bp, Homo sapiens
tctgggcgcttgcacgtgt

SEQ ID NO: 25869 - DNA, 19 bp, Homo sapiens
tgctgggcgcttgcacgtg

SEQ ID NO: 25870 - DNA, 19 bp, Homo sapiens
tggctgggcgcttgcacgt

SEQ ID NO: 25871 - DNA, 19 bp, Homo sapiens
taggctgggcgcttgcacg

SEQ ID NO: 25872 - DNA, 19 bp, Homo sapiens
tcaggctgggcgcttgcac

SEQ ID NO: 25873 - DNA, 19 bp, Homo sapiens
ttccaggctgggcgcttgc

SEQ ID NO: 25874 - DNA, 19 bp, Homo sapiens
tctccaggctgggcgcttg

SEQ ID NO: 25875 - DNA, 19 bp, Homo sapiens
tgctccaggctgggcgctt

SEQ ID NO: 25876 - DNA, 19 bp, Homo sapiens
tggctccaggctgggcgct

SEQ ID NO: 25877 - DNA, 19 bp, Homo sapiens
tgggctccaggctgggcgc

SEQ ID NO: 25878 - DNA, 19 bp, Homo sapiens
tagggctccaggctgggcg

SEQ ID NO: 25879 - DNA, 19 bp, Homo sapiens
tgagggctccaggctgggc

SEQ ID NO: 25880 - DNA, 19 bp, Homo sapiens
tcgagggctccaggctggg

SEQ ID NO: 25881 - DNA, 19 bp, Homo sapiens
tccgagggctccaggctgg

SEQ ID NO: 25882 - DNA, 19 bp, Homo sapiens
taccgagggctccaggctg

SEQ ID NO: 25883 - DNA, 19 bp, Homo sapiens
tcaccgagggctccaggct

SEQ ID NO: 25884 - DNA, 19 bp, Homo sapiens
tacaccgagggctccaggc

SEQ ID NO: 25885 - DNA, 19 bp, Homo sapiens
tgacaccgagggctccagg

SEQ ID NO: 25886 - DNA, 19 bp, Homo sapiens
tggacaccgagggctccag

SEQ ID NO: 25887 - DNA, 19 bp, Homo sapiens
tgggacaccgagggctcca

SEQ ID NO: 25888 - DNA, 19 bp, Homo sapiens
ttggggacaccgagggctc

SEQ ID NO: 25889 - DNA, 19 bp, Homo sapiens
ttgtggggacaccgagggc

SEQ ID NO: 25890 - DNA, 19 bp, Homo sapiens
tctgtggggacaccgaggg

SEQ ID NO: 25891 - DNA, 19 bp, Homo sapiens
ttcctgtggggacaccgag

SEQ ID NO: 25892 - DNA, 19 bp, Homo sapiens
tatcctgtggggacaccga

SEQ ID NO: 25893 - DNA, 19 bp, Homo sapiens
ttttcatcctgtggggaca

SEQ ID NO: 25894 - DNA, 19 bp, Homo sapiens
ttgtttcatcctgtgggga

SEQ ID NO: 25895 - DNA, 19 bp, Homo sapiens
tctgtttcatcctgtgggg

SEQ ID NO: 25896 - DNA, 19 bp, Homo sapiens
tgctgtttcatcctgtggg

SEQ ID NO: 25897 - DNA, 19 bp, Homo sapiens
tagctgtttcatcctgtgg

SEQ ID NO: 25898 - DNA, 19 bp, Homo sapiens
tttcagctgtttcatcctg

SEQ ID NO: 25899 - DNA, 19 bp, Homo sapiens
tcttcagctgtttcatcct

SEQ ID NO: 25900 - DNA, 19 bp, Homo sapiens
tacttcagctgtttcatcc

SEQ ID NO: 25901 - DNA, 19 bp, Homo sapiens
tcacttcagctgtttcatc

SEQ ID NO: 25902 - DNA, 19 bp, Homo sapiens
tccacttcagctgtttcat

SEQ ID NO: 25903 - DNA, 19 bp, Homo sapiens
ttgccacttcagctgtttc

SEQ ID NO: 25904 - DNA, 19 bp, Homo sapiens
tctgccacttcagctgttt

SEQ ID NO: 25905 - DNA, 19 bp, Homo sapiens
tactgccacttcagctgtt

SEQ ID NO: 25906 - DNA, 19 bp, Homo sapiens
taactgccacttcagctgt

SEQ ID NO: 25907 - DNA, 19 bp, Homo sapiens
tgaactgccacttcagctg

SEQ ID NO: 25908 - DNA, 19 bp, Homo sapiens
ttggaactgccacttcagc

SEQ ID NO: 25909 - DNA, 19 bp, Homo sapiens
tctggaactgccacttcag

SEQ ID NO: 25910 - DNA, 19 bp, Homo sapiens
tgctggaactgccacttca

SEQ ID NO: 25911 - DNA, 19 bp, Homo sapiens
tcgctggaactgccacttc

SEQ ID NO: 25912 - DNA, 19 bp, Homo sapiens
tccgctggaactgccactt

SEQ ID NO: 25913 - DNA, 19 bp, Homo sapiens
tgccgctggaactgccact

SEQ ID NO: 25914 - DNA, 19 bp, Homo sapiens
tagccgctggaactgccac

SEQ ID NO: 25915 - DNA, 19 bp, Homo sapiens
tcagccgctggaactgcca

SEQ ID NO: 25916 - DNA, 19 bp, Homo sapiens
tacagccgctggaactgcc

SEQ ID NO: 25917 - DNA, 19 bp, Homo sapiens
tgacagccgctggaactgc

SEQ ID NO: 25918 - DNA, 19 bp, Homo sapiens
tggacagccgctggaactg

SEQ ID NO: 25919 - DNA, 19 bp, Homo sapiens
tgggacagccgctggaact

SEQ ID NO: 25920 - DNA, 19 bp, Homo sapiens
tagggacagccgctggaac

SEQ ID NO: 25921 - DNA, 19 bp, Homo sapiens
tcagggacagccgctggaa

SEQ ID NO: 25922 - DNA, 19 bp, Homo sapiens
tgcagggacagccgctgga

SEQ ID NO: 25923 - DNA, 19 bp, Homo sapiens
tcgcagggacagccgctgg

SEQ ID NO: 25924 - DNA, 19 bp, Homo sapiens
tccgcagggacagccgctg

SEQ ID NO: 25925 - DNA, 19 bp, Homo sapiens
ttgccgcagggacagccgc

SEQ ID NO: 25926 - DNA, 19 bp, Homo sapiens
ttctgccgcagggacagcc

SEQ ID NO: 25927 - DNA, 19 bp, Homo sapiens
tctctgccgcagggacagc

SEQ ID NO: 25928 - DNA, 19 bp, Homo sapiens
tcctctgccgcagggacag

SEQ ID NO: 25929 - DNA, 19 bp, Homo sapiens
tgcctctgccgcagggaca

SEQ ID NO: 25930 - DNA, 19 bp, Homo sapiens
tagcctctgccgcagggac

SEQ ID NO: 25931 - DNA, 19 bp, Homo sapiens
ttcagcctctgccgcaggg

SEQ ID NO: 25932 - DNA, 19 bp, Homo sapiens
tctcagcctctgccgcagg

SEQ ID NO: 25933 - DNA, 19 bp, Homo sapiens
tcctcagcctctgccgcag

SEQ ID NO: 25934 - DNA, 19 bp, Homo sapiens
tgcctcagcctctgccgca

SEQ ID NO: 25935 - DNA, 19 bp, Homo sapiens
tggcctcagcctctgccgc

SEQ ID NO: 25936 - DNA, 19 bp, Homo sapiens
ttcggcctcagcctctgcc

SEQ ID NO: 25937 - DNA, 19 bp, Homo sapiens
tctcggcctcagcctctgc

SEQ ID NO: 25938 - DNA, 19 bp, Homo sapiens
tcctcggcctcagcctctg

SEQ ID NO: 25939 - DNA, 19 bp, Homo sapiens
tacctcggcctcagcctct

SEQ ID NO: 25940 - DNA, 19 bp, Homo sapiens
ttcacctcggcctcagcct

SEQ ID NO: 25941 - DNA, 19 bp, Homo sapiens
tgtcacctcggcctcagcc

SEQ ID NO: 25942 - DNA, 19 bp, Homo sapiens
tcgtcacctcggcctcagc

SEQ ID NO: 25943 - DNA, 19 bp, Homo sapiens
tgcgtcacctcggcctcag

SEQ ID NO: 25944 - DNA, 19 bp, Homo sapiens
tagcgtcacctcggcctca

SEQ ID NO: 25945 - DNA, 19 bp, Homo sapiens
tcagcgtcacctcggcctc

SEQ ID NO: 25946 - DNA, 19 bp, Homo sapiens
tgcagcgtcacctcggcct

SEQ ID NO: 25947 - DNA, 19 bp, Homo sapiens
tcgcagcgtcacctcggcc

SEQ ID NO: 25948 - DNA, 19 bp, Homo sapiens
tccgcagcgtcacctcggc

SEQ ID NO: 25949 - DNA, 19 bp, Homo sapiens
ttcccgcagcgtcacctcg

SEQ ID NO: 25950 - DNA, 19 bp, Homo sapiens
tctcccgcagcgtcacctc

SEQ ID NO: 25951 - DNA, 19 bp, Homo sapiens
tgctcccgcagcgtcacct

SEQ ID NO: 25952 - DNA, 19 bp, Homo sapiens
tagctcccgcagcgtcacc

SEQ ID NO: 25953 - DNA, 19 bp, Homo sapiens
tgagctcccgcagcgtcac

SEQ ID NO: 25954 - DNA, 19 bp, Homo sapiens
ttggagctcccgcagcgtc

SEQ ID NO: 25955 - DNA, 19 bp, Homo sapiens
tctggagctcccgcagcgt

SEQ ID NO: 25956 - DNA, 19 bp, Homo sapiens
tttcctggagctcccgcag

SEQ ID NO: 25957 - DNA, 19 bp, Homo sapiens
tcttcctggagctcccgca

SEQ ID NO: 25958 - DNA, 19 bp, Homo sapiens
tgcttcctggagctcccgc

SEQ ID NO: 25959 - DNA, 19 bp, Homo sapiens
tggcttcctggagctcccg

SEQ ID NO: 25960 - DNA, 19 bp, Homo sapiens
tgggcttcctggagctccc

SEQ ID NO: 25961 - DNA, 19 bp, Homo sapiens
tagggcttcctggagctcc

SEQ ID NO: 25962 - DNA, 19 bp, Homo sapiens
tcagggcttcctggagctc

SEQ ID NO: 25963 - DNA, 19 bp, Homo sapiens
ttccagggcttcctggagc

SEQ ID NO: 25964 - DNA, 19 bp, Homo sapiens
tctccagggcttcctggag

SEQ ID NO: 25965 - DNA, 19 bp, Homo sapiens
ttcctccagggcttcctgg

SEQ ID NO: 25966 - DNA, 19 bp, Homo sapiens
tctcctccagggcttcctg

SEQ ID NO: 25967 - DNA, 19 bp, Homo sapiens
ttcctcctccagggcttcc

SEQ ID NO: 25968 - DNA, 19 bp, Homo sapiens
tctcctcctccagggcttc

SEQ ID NO: 25969 - DNA, 19 bp, Homo sapiens
tcctcctcctccagggctt

SEQ ID NO: 25970 - DNA, 19 bp, Homo sapiens
tacctcctcctccagggct

SEQ ID NO: 25971 - DNA, 19 bp, Homo sapiens
tcacctcctcctccagggc

SEQ ID NO: 25972 - DNA, 19 bp, Homo sapiens
tgcacctcctcctccaggg

SEQ ID NO: 25973 - DNA, 19 bp, Homo sapiens
tagcacctcctcctccagg

SEQ ID NO: 25974 - DNA, 19 bp, Homo sapiens
ttgagcacctcctcctcca

SEQ ID NO: 25975 - DNA, 19 bp, Homo sapiens
tgtgagcacctcctcctcc

SEQ ID NO: 25976 - DNA, 19 bp, Homo sapiens
tggtgagcacctcctcctc

SEQ ID NO: 25977 - DNA, 19 bp, Homo sapiens
tgggtgagcacctcctcct

SEQ ID NO: 25978 - DNA, 19 bp, Homo sapiens
tcgggtgagcacctcctcc

SEQ ID NO: 25979 - DNA, 19 bp, Homo sapiens
tccgggtgagcacctcctc

SEQ ID NO: 25980 - DNA, 19 bp, Homo sapiens
ttgccgggtgagcacctcc

SEQ ID NO: 25981 - DNA, 19 bp, Homo sapiens
ttctgccgggtgagcacct

SEQ ID NO: 25982 - DNA, 19 bp, Homo sapiens
tctctgccgggtgagcacc

SEQ ID NO: 25983 - DNA, 19 bp, Homo sapiens
tgctctgccgggtgagcac

SEQ ID NO: 25984 - DNA, 19 bp, Homo sapiens
tggctctgccgggtgagca

SEQ ID NO: 25985 - DNA, 19 bp, Homo sapiens
taggctctgccgggtgagc

SEQ ID NO: 25986 - DNA, 19 bp, Homo sapiens
ttcaggctctgccgggtga

SEQ ID NO: 25987 - DNA, 19 bp, Homo sapiens
tctcaggctctgccgggtg

SEQ ID NO: 25988 - DNA, 19 bp, Homo sapiens
tgctcaggctctgccgggt

SEQ ID NO: 25989 - DNA, 19 bp, Homo sapiens
tggctcaggctctgccggg

SEQ ID NO: 25990 - DNA, 19 bp, Homo sapiens
tcggctcaggctctgccgg

SEQ ID NO: 25991 - DNA, 19 bp, Homo sapiens
tccggctcaggctctgccg

SEQ ID NO: 25992 - DNA, 19 bp, Homo sapiens
ttcccggctcaggctctgc

SEQ ID NO: 25993 - DNA, 19 bp, Homo sapiens
ttctcccggctcaggctct

SEQ ID NO: 25994 - DNA, 19 bp, Homo sapiens
tatctcccggctcaggctc

SEQ ID NO: 25995 - DNA, 19 bp, Homo sapiens
tcatctcccggctcaggct

SEQ ID NO: 25996 - DNA, 19 bp, Homo sapiens
ttccatctcccggctcagg

SEQ ID NO: 25997 - DNA, 19 bp, Homo sapiens
tctccatctcccggctcag

SEQ ID NO: 25998 - DNA, 19 bp, Homo sapiens
tcctccatctcccggctca

SEQ ID NO: 25999 - DNA, 19 bp, Homo sapiens
tgcctccatctcccggctc

SEQ ID NO: 26000 - DNA, 19 bp, Homo sapiens
ttggcctccatctcccggc

SEQ ID NO: 26001 - DNA, 19 bp, Homo sapiens
tatggcctccatctcccgg

SEQ ID NO: 26002 - DNA, 19 bp, Homo sapiens
tgatggcctccatctcccg

SEQ ID NO: 26003 - DNA, 19 bp, Homo sapiens
tggatggcctccatctccc

SEQ ID NO: 26004 - DNA, 19 bp, Homo sapiens
tcggatggcctccatctcc

SEQ ID NO: 26005 - DNA, 19 bp, Homo sapiens
ttgcggatggcctccatct

SEQ ID NO: 26006 - DNA, 19 bp, Homo sapiens
tgtgcggatggcctccatc

SEQ ID NO: 26007 - DNA, 19 bp, Homo sapiens
tcgtgcggatggcctccat

SEQ ID NO: 26008 - DNA, 19 bp, Homo sapiens
ttccgtgcggatggcctcc

SEQ ID NO: 26009 - DNA, 19 bp, Homo sapiens
tttgtccgtgcggatggcc

SEQ ID NO: 26010 - DNA, 19 bp, Homo sapiens
tgttgtccgtgcggatggc

SEQ ID NO: 26011 - DNA, 19 bp, Homo sapiens
ttggttgtccgtgcggatg

SEQ ID NO: 26012 - DNA, 19 bp, Homo sapiens
tttctggttgtccgtgcgg

SEQ ID NO: 26013 - DNA, 19 bp, Homo sapiens
tgttctggttgtccgtgcg

SEQ ID NO: 26014 - DNA, 19 bp, Homo sapiens
tagttctggttgtccgtgc

SEQ ID NO: 26015 - DNA, 19 bp, Homo sapiens
taagttctggttgtccgtg

SEQ ID NO: 26016 - DNA, 19 bp, Homo sapiens
tgaagttctggttgtccgt

SEQ ID NO: 26017 - DNA, 19 bp, Homo sapiens
tcgaagttctggttgtccg

SEQ ID NO: 26018 - DNA, 19 bp, Homo sapiens
tgcgaagttctggttgtcc

SEQ ID NO: 26019 - DNA, 19 bp, Homo sapiens
ttggcgaagttctggttgt

SEQ ID NO: 26020 - DNA, 19 bp, Homo sapiens
tctggcgaagttctggttg

SEQ ID NO: 26021 - DNA, 19 bp, Homo sapiens
tactggcgaagttctggtt

SEQ ID NO: 26022 - DNA, 19 bp, Homo sapiens
tttgactggcgaagttctg

SEQ ID NO: 26023 - DNA, 19 bp, Homo sapiens
tgttgactggcgaagttct

SEQ ID NO: 26024 - DNA, 19 bp, Homo sapiens
ttagttgactggcgaagtt

SEQ ID NO: 26025 - DNA, 19 bp, Homo sapiens
tgtagttgactggcgaagt

SEQ ID NO: 26026 - DNA, 19 bp, Homo sapiens
tcgtagttgactggcgaag

SEQ ID NO: 26027 - DNA, 19 bp, Homo sapiens
tgcgtagttgactggcgaa

SEQ ID NO: 26028 - DNA, 19 bp, Homo sapiens
ttcgcgtagttgactggcg

SEQ ID NO: 26029 - DNA, 19 bp, Homo sapiens
tctcgcgtagttgactggc

SEQ ID NO: 26030 - DNA, 19 bp, Homo sapiens
tcctcgcgtagttgactgg

SEQ ID NO: 26031 - DNA, 19 bp, Homo sapiens
ttgcctcgcgtagttgact

SEQ ID NO: 26032 - DNA, 19 bp, Homo sapiens
ttctgcctcgcgtagttga

SEQ ID NO: 26033 - DNA, 19 bp, Homo sapiens
tctctgcctcgcgtagttg

SEQ ID NO: 26034 - DNA, 19 bp, Homo sapiens
tcctctgcctcgcgtagtt

SEQ ID NO: 26035 - DNA, 19 bp, Homo sapiens
tgcctctgcctcgcgtagt

SEQ ID NO: 26036 - DNA, 19 bp, Homo sapiens
tagcctctgcctcgcgtag

SEQ ID NO: 26037 - DNA, 19 bp, Homo sapiens
tgagcctctgcctcgcgta

SEQ ID NO: 26038 - DNA, 19 bp, Homo sapiens
tcgagcctctgcctcgcgt

SEQ ID NO: 26039 - DNA, 19 bp, Homo sapiens
tttccgagcctctgcctcg

SEQ ID NO: 26040 - DNA, 19 bp, Homo sapiens
tgttccgagcctctgcctc

SEQ ID NO: 26041 - DNA, 19 bp, Homo sapiens
tggttccgagcctctgcct

SEQ ID NO: 26042 - DNA, 19 bp, Homo sapiens
tcggttccgagcctctgcc

SEQ ID NO: 26043 - DNA, 19 bp, Homo sapiens
tccggttccgagcctctgc

SEQ ID NO: 26044 - DNA, 19 bp, Homo sapiens
ttcccggttccgagcctct

SEQ ID NO: 26045 - DNA, 19 bp, Homo sapiens
tgtcccggttccgagcctc

SEQ ID NO: 26046 - DNA, 19 bp, Homo sapiens
tggtcccggttccgagcct

SEQ ID NO: 26047 - DNA, 19 bp, Homo sapiens
ttaggtcccggttccgagc

SEQ ID NO: 26048 - DNA, 19 bp, Homo sapiens
ttctaggtcccggttccga

SEQ ID NO: 26049 - DNA, 19 bp, Homo sapiens
tctctaggtcccggttccg

SEQ ID NO: 26050 - DNA, 19 bp, Homo sapiens
tcctctaggtcccggttcc

SEQ ID NO: 26051 - DNA, 19 bp, Homo sapiens
ttgcctctaggtcccggtt

SEQ ID NO: 26052 - DNA, 19 bp, Homo sapiens
ttgtgcctctaggtcccgg

SEQ ID NO: 26053 - DNA, 19 bp, Homo sapiens
tgtgtgcctctaggtcccg

SEQ ID NO: 26054 - DNA, 19 bp, Homo sapiens
tcgtgtgcctctaggtccc

SEQ ID NO: 26055 - DNA, 19 bp, Homo sapiens
tacgtgtgcctctaggtcc

SEQ ID NO: 26056 - DNA, 19 bp, Homo sapiens
tgacgtgtgcctctaggtc

SEQ ID NO: 26057 - DNA, 19 bp, Homo sapiens
tggacgtgtgcctctaggt

SEQ ID NO: 26058 - DNA, 19 bp, Homo sapiens
tcggacgtgtgcctctagg

SEQ ID NO: 26059 - DNA, 19 bp, Homo sapiens
tccggacgtgtgcctctag

SEQ ID NO: 26060 - DNA, 19 bp, Homo sapiens
ttgccggacgtgtgcctct

SEQ ID NO: 26061 - DNA, 19 bp, Homo sapiens
tctgccggacgtgtgcctc

SEQ ID NO: 26062 - DNA, 19 bp, Homo sapiens
tactgccggacgtgtgcct

SEQ ID NO: 26063 - DNA, 19 bp, Homo sapiens
taactgccggacgtgtgcc

SEQ ID NO: 26064 - DNA, 19 bp, Homo sapiens
tcaactgccggacgtgtgc

SEQ ID NO: 26065 - DNA, 19 bp, Homo sapiens
ttgcaactgccggacgtgt

SEQ ID NO: 26066 - DNA, 19 bp, Homo sapiens
tctgcaactgccggacgtg

SEQ ID NO: 26067 - DNA, 19 bp, Homo sapiens
ttcctgcaactgccggacg

SEQ ID NO: 26068 - DNA, 19 bp, Homo sapiens
tctcctgcaactgccggac

SEQ ID NO: 26069 - DNA, 19 bp, Homo sapiens
tgctcctgcaactgccgga

SEQ ID NO: 26070 - DNA, 19 bp, Homo sapiens
tcgctcctgcaactgccgg

SEQ ID NO: 26071 - DNA, 19 bp, Homo sapiens
ttccgctcctgcaactgcc

SEQ ID NO: 26072 - DNA, 19 bp, Homo sapiens
tatccgctcctgcaactgc

SEQ ID NO: 26073 - DNA, 19 bp, Homo sapiens
tcatccgctcctgcaactg

SEQ ID NO: 26074 - DNA, 19 bp, Homo sapiens
ttccatccgctcctgcaac

SEQ ID NO: 26075 - DNA, 19 bp, Homo sapiens
tctccatccgctcctgcaa

SEQ ID NO: 26076 - DNA, 19 bp, Homo sapiens
tactccatccgctcctgca

SEQ ID NO: 26077 - DNA, 19 bp, Homo sapiens
taactccatccgctcctgc

SEQ ID NO: 26078 - DNA, 19 bp, Homo sapiens
tcaactccatccgctcctg

SEQ ID NO: 26079 - DNA, 19 bp, Homo sapiens
tgcaactccatccgctcct

SEQ ID NO: 26080 - DNA, 19 bp, Homo sapiens
tagcaactccatccgctcc

SEQ ID NO: 26081 - DNA, 19 bp, Homo sapiens
tcagcaactccatccgctc

SEQ ID NO: 26082 - DNA, 19 bp, Homo sapiens
ttgcagcaactccatccgc

SEQ ID NO: 26083 - DNA, 19 bp, Homo sapiens
tctgcagcaactccatccg

SEQ ID NO: 26084 - DNA, 19 bp, Homo sapiens
tcctgcagcaactccatcc

SEQ ID NO: 26085 - DNA, 19 bp, Homo sapiens
ttgcctgcagcaactccat

SEQ ID NO: 26086 - DNA, 19 bp, Homo sapiens
ttctgcctgcagcaactcc

SEQ ID NO: 26087 - DNA, 19 bp, Homo sapiens
tctctgcctgcagcaactc

SEQ ID NO: 26088 - DNA, 19 bp, Homo sapiens
tcctctgcctgcagcaact

SEQ ID NO: 26089 - DNA, 19 bp, Homo sapiens
ttccctctgcctgcagcaa

SEQ ID NO: 26090 - DNA, 19 bp, Homo sapiens
tctccctctgcctgcagca

SEQ ID NO: 26091 - DNA, 19 bp, Homo sapiens
tgctccctctgcctgcagc

SEQ ID NO: 26092 - DNA, 19 bp, Homo sapiens
ttggctccctctgcctgca

SEQ ID NO: 26093 - DNA, 19 bp, Homo sapiens
ttgtggctccctctgcctg

SEQ ID NO: 26094 - DNA, 19 bp, Homo sapiens
tctgtggctccctctgcct

SEQ ID NO: 26095 - DNA, 19 bp, Homo sapiens
tcctgtggctccctctgcc

SEQ ID NO: 26096 - DNA, 19 bp, Homo sapiens
tacctgtggctccctctgc

SEQ ID NO: 26097 - DNA, 19 bp, Homo sapiens
tgacctgtggctccctctg

SEQ ID NO: 26098 - DNA, 19 bp, Homo sapiens
tggacctgtggctccctct

SEQ ID NO: 26099 - DNA, 19 bp, Homo sapiens
tgggacctgtggctccctc

SEQ ID NO: 26100 - DNA, 19 bp, Homo sapiens
ttagggacctgtggctccc

SEQ ID NO: 26101 - DNA, 19 bp, Homo sapiens
tctagggacctgtggctcc

SEQ ID NO: 26102 - DNA, 19 bp, Homo sapiens
tcctagggacctgtggctc

SEQ ID NO: 26103 - DNA, 19 bp, Homo sapiens
tgcctagggacctgtggct

SEQ ID NO: 26104 - DNA, 19 bp, Homo sapiens
tggcctagggacctgtggc

SEQ ID NO: 26105 - DNA, 19 bp, Homo sapiens
taggcctagggacctgtgg

SEQ ID NO: 26106 - DNA, 19 bp, Homo sapiens
tcaggcctagggacctgtg

SEQ ID NO: 26107 - DNA, 19 bp, Homo sapiens
tccaggcctagggacctgt

SEQ ID NO: 26108 - DNA, 19 bp, Homo sapiens
tgccaggcctagggacctg

SEQ ID NO: 26109 - DNA, 19 bp, Homo sapiens
tggccaggcctagggacct

SEQ ID NO: 26110 - DNA, 19 bp, Homo sapiens
ttaggccaggcctagggac

SEQ ID NO: 26111 - DNA, 19 bp, Homo sapiens
tataggccaggcctaggga

SEQ ID NO: 26112 - DNA, 19 bp, Homo sapiens
tgataggccaggcctaggg

SEQ ID NO: 26113 - DNA, 19 bp, Homo sapiens
tcgataggccaggcctagg

SEQ ID NO: 26114 - DNA, 19 bp, Homo sapiens
ttccgataggccaggccta

SEQ ID NO: 26115 - DNA, 19 bp, Homo sapiens
tctccgataggccaggcct

SEQ ID NO: 26116 - DNA, 19 bp, Homo sapiens
tcctccgataggccaggcc

SEQ ID NO: 26117 - DNA, 19 bp, Homo sapiens
tgcctccgataggccaggc

SEQ ID NO: 26118 - DNA, 19 bp, Homo sapiens
tcgcctccgataggccagg

SEQ ID NO: 26119 - DNA, 19 bp, Homo sapiens
tgcgcctccgataggccag

SEQ ID NO: 26120 - DNA, 19 bp, Homo sapiens
tagcgcctccgataggcca

SEQ ID NO: 26121 - DNA, 19 bp, Homo sapiens
taagcgcctccgataggcc

SEQ ID NO: 26122 - DNA, 19 bp, Homo sapiens
taaagcgcctccgataggc

SEQ ID NO: 26123 - DNA, 19 bp, Homo sapiens
tgaaagcgcctccgatagg

SEQ ID NO: 26124 - DNA, 19 bp, Homo sapiens
tggaaagcgcctccgatag

SEQ ID NO: 26125 - DNA, 19 bp, Homo sapiens
tgggaaagcgcctccgata

SEQ ID NO: 26126 - DNA, 19 bp, Homo sapiens
tagggaaagcgcctccgat

SEQ ID NO: 26127 - DNA, 19 bp, Homo sapiens
tcagggaaagcgcctccga

SEQ ID NO: 26128 - DNA, 19 bp, Homo sapiens
tgcagggaaagcgcctccg

SEQ ID NO: 26129 - DNA, 19 bp, Homo sapiens
tagcagggaaagcgcctcc

SEQ ID NO: 26130 - DNA, 19 bp, Homo sapiens
tgagcagggaaagcgcctc

SEQ ID NO: 26131 - DNA, 19 bp, Homo sapiens
tggagcagggaaagcgcct

SEQ ID NO: 26132 - DNA, 19 bp, Homo sapiens
taggagcagggaaagcgcc

SEQ ID NO: 26133 - DNA, 19 bp, Homo sapiens
tcaggagcagggaaagcgc

SEQ ID NO: 26134 - DNA, 19 bp, Homo sapiens
tacaggagcagggaaagcg

SEQ ID NO: 26135 - DNA, 19 bp, Homo sapiens
taacaggagcagggaaagc

SEQ ID NO: 26136 - DNA, 19 bp, Homo sapiens
tgaacaggagcagggaaag

SEQ ID NO: 26137 - DNA, 19 bp, Homo sapiens
tcgaacaggagcagggaaa

SEQ ID NO: 26138 - DNA, 19 bp, Homo sapiens
tgcgaacaggagcagggaa

SEQ ID NO: 26139 - DNA, 19 bp, Homo sapiens
tggcgaacaggagcaggga

SEQ ID NO: 26140 - DNA, 19 bp, Homo sapiens
tcggcgaacaggagcaggg

SEQ ID NO: 26141 - DNA, 19 bp, Homo sapiens
tacggcgaacaggagcagg

SEQ ID NO: 26142 - DNA, 19 bp, Homo sapiens
taacggcgaacaggagcag

SEQ ID NO: 26143 - DNA, 19 bp, Homo sapiens
tcaacggcgaacaggagca

SEQ ID NO: 26144 - DNA, 19 bp, Homo sapiens
tacaacggcgaacaggagc

SEQ ID NO: 26145 - DNA, 19 bp, Homo sapiens
taacaacggcgaacaggag

SEQ ID NO: 26146 - DNA, 19 bp, Homo sapiens
tgaacaacggcgaacagga

SEQ ID NO: 26147 - DNA, 19 bp, Homo sapiens
tagaacaacggcgaacagg

SEQ ID NO: 26148 - DNA, 19 bp, Homo sapiens
tcagaacaacggcgaacag

SEQ ID NO: 26149 - DNA, 19 bp, Homo sapiens
tacagaacaacggcgaaca

SEQ ID NO: 26150 - DNA, 19 bp, Homo sapiens
tgacagaacaacggcgaac

SEQ ID NO: 26151 - DNA, 19 bp, Homo sapiens
tagacagaacaacggcgaa

SEQ ID NO: 26152 - DNA, 19 bp, Homo sapiens
tgagacagaacaacggcga

SEQ ID NO: 26153 - DNA, 19 bp, Homo sapiens
tcgagacagaacaacggcg

SEQ ID NO: 26154 - DNA, 19 bp, Homo sapiens
tacgagacagaacaacggc

SEQ ID NO: 26155 - DNA, 19 bp, Homo sapiens
tcacgagacagaacaacgg

SEQ ID NO: 26156 - DNA, 19 bp, Homo sapiens
tgcacgagacagaacaacg

SEQ ID NO: 26157 - DNA, 19 bp, Homo sapiens
tggcacgagacagaacaac

SEQ ID NO: 26158 - DNA, 19 bp, Homo sapiens
tcggcacgagacagaacaa

SEQ ID NO: 26159 - DNA, 19 bp, Homo sapiens
tgcggcacgagacagaaca

SEQ ID NO: 26160 - DNA, 19 bp, Homo sapiens
tggcggcacgagacagaac

SEQ ID NO: 26161 - DNA, 19 bp, Homo sapiens
tcggcggcacgagacagaa

SEQ ID NO: 26162 - DNA, 19 bp, Homo sapiens
tgcggcggcacgagacaga

SEQ ID NO: 26163 - DNA, 19 bp, Homo sapiens
tggcggcggcacgagacag

SEQ ID NO: 26164 - DNA, 19 bp, Homo sapiens
tgggcggcggcacgagaca

SEQ ID NO: 26165 - DNA, 19 bp, Homo sapiens
tagggcggcggcacgagac

SEQ ID NO: 26166 - DNA, 19 bp, Homo sapiens
tcagggcggcggcacgaga

SEQ ID NO: 26167 - DNA, 19 bp, Homo sapiens
tccagggcggcggcacgag

SEQ ID NO: 26168 - DNA, 19 bp, Homo sapiens
tcccagggcggcggcacga

SEQ ID NO: 26169 - DNA, 19 bp, Homo sapiens
tgcccagggcggcggcacg

SEQ ID NO: 26170 - DNA, 19 bp, Homo sapiens
tagcccagggcggcggcac

SEQ ID NO: 26171 - DNA, 19 bp, Homo sapiens
tcagcccagggcggcggca

SEQ ID NO: 26172 - DNA, 19 bp, Homo sapiens
ttgcagcccagggcggcgg

SEQ ID NO: 26173 - DNA, 19 bp, Homo sapiens
tatgcagcccagggcggcg

SEQ ID NO: 26174 - DNA, 19 bp, Homo sapiens
taatgcagcccagggcggc

SEQ ID NO: 26175 - DNA, 19 bp, Homo sapiens
tcaatgcagcccagggcgg

SEQ ID NO: 26176 - DNA, 19 bp, Homo sapiens
tccaatgcagcccagggcg

SEQ ID NO: 26177 - DNA, 19 bp, Homo sapiens
tcccaatgcagcccagggc

SEQ ID NO: 26178 - DNA, 19 bp, Homo sapiens
tacccaatgcagcccaggg

SEQ ID NO: 26179 - DNA, 19 bp, Homo sapiens
taacccaatgcagcccagg

SEQ ID NO: 26180 - DNA, 19 bp, Homo sapiens
tcaacccaatgcagcccag

SEQ ID NO: 26181 - DNA, 19 bp, Homo sapiens
tccaacccaatgcagccca

SEQ ID NO: 26182 - DNA, 19 bp, Homo sapiens
taccaacccaatgcagccc

SEQ ID NO: 26183 - DNA, 19 bp, Homo sapiens
tcaccaacccaatgcagcc

SEQ ID NO: 26184 - DNA, 19 bp, Homo sapiens
tccaccaacccaatgcagc

SEQ ID NO: 26185 - DNA, 19 bp, Homo sapiens
tgccaccaacccaatgcag

SEQ ID NO: 26186 - DNA, 19 bp, Homo sapiens
tggccaccaacccaatgca

SEQ ID NO: 26187 - DNA, 19 bp, Homo sapiens
ttgggccaccaacccaatg

SEQ ID NO: 26188 - DNA, 19 bp, Homo sapiens
tgtgggccaccaacccaat

SEQ ID NO: 26189 - DNA, 19 bp, Homo sapiens
tcgtgggccaccaacccaa

SEQ ID NO: 26190 - DNA, 19 bp, Homo sapiens
tgcgtgggccaccaaccca

SEQ ID NO: 26191 - DNA, 19 bp, Homo sapiens
tggcgtgggccaccaaccc

SEQ ID NO: 26192 - DNA, 19 bp, Homo sapiens
tcggcgtgggccaccaacc

SEQ ID NO: 26193 - DNA, 19 bp, Homo sapiens
tccggcgtgggccaccaac

SEQ ID NO: 26194 - DNA, 19 bp, Homo sapiens
tgccggcgtgggccaccaa

SEQ ID NO: 26195 - DNA, 19 bp, Homo sapiens
tttggccggcgtgggccac

SEQ ID NO: 26196 - DNA, 19 bp, Homo sapiens
tgttggccggcgtgggcca

SEQ ID NO: 26197 - DNA, 19 bp, Homo sapiens
tagttggccggcgtgggcc

SEQ ID NO: 26198 - DNA, 19 bp, Homo sapiens
ttgagttggccggcgtggg

SEQ ID NO: 26199 - DNA, 19 bp, Homo sapiens
tgtgagttggccggcgtgg

SEQ ID NO: 26200 - DNA, 19 bp, Homo sapiens
tggtgagttggccggcgtg

SEQ ID NO: 26201 - DNA, 19 bp, Homo sapiens
tcggtgagttggccggcgt

SEQ ID NO: 26202 - DNA, 19 bp, Homo sapiens
ttgcggtgagttggccggc

SEQ ID NO: 26203 - DNA, 19 bp, Homo sapiens
tctgcggtgagttggccgg

SEQ ID NO: 26204 - DNA, 19 bp, Homo sapiens
tactgcggtgagttggccg

SEQ ID NO: 26205 - DNA, 19 bp, Homo sapiens
tgactgcggtgagttggcc

SEQ ID NO: 26206 - DNA, 19 bp, Homo sapiens
tagactgcggtgagttggc

SEQ ID NO: 26207 - DNA, 19 bp, Homo sapiens
tcagactgcggtgagttgg

SEQ ID NO: 26208 - DNA, 19 bp, Homo sapiens
tccagactgcggtgagttg

SEQ ID NO: 26209 - DNA, 19 bp, Homo sapiens
tgccagactgcggtgagtt

SEQ ID NO: 26210 - DNA, 19 bp, Homo sapiens
tcgccagactgcggtgagt

SEQ ID NO: 26211 - DNA, 19 bp, Homo sapiens
tgcgccagactgcggtgag

SEQ ID NO: 26212 - DNA, 19 bp, Homo sapiens
tggcgccagactgcggtga

SEQ ID NO: 26213 - DNA, 19 bp, Homo sapiens
tcggcgccagactgcggtg

SEQ ID NO: 26214 - DNA, 19 bp, Homo sapiens
tgcggcgccagactgcggt

SEQ ID NO: 26215 - DNA, 19 bp, Homo sapiens
tggcggcgccagactgcgg

SEQ ID NO: 26216 - DNA, 19 bp, Homo sapiens
ttgggcggcgccagactgc

SEQ ID NO: 26217 - DNA, 19 bp, Homo sapiens
tctgggcggcgccagactg

SEQ ID NO: 26218 - DNA, 19 bp, Homo sapiens
ttcctgggcggcgccagac

SEQ ID NO: 26219 - DNA, 19 bp, Homo sapiens
tctcctgggcggcgccaga

SEQ ID NO: 26220 - DNA, 19 bp, Homo sapiens
tgctcctgggcggcgccag

SEQ ID NO: 26221 - DNA, 19 bp, Homo sapiens
tggctcctgggcggcgcca

SEQ ID NO: 26222 - DNA, 19 bp, Homo sapiens
tcggctcctgggcggcgcc

SEQ ID NO: 26223 - DNA, 19 bp, Homo sapiens
tgcggctcctgggcggcgc

SEQ ID NO: 26224 - DNA, 19 bp, Homo sapiens
tggcggctcctgggcggcg

SEQ ID NO: 26225 - DNA, 19 bp, Homo sapiens
tgggcggctcctgggcggc

SEQ ID NO: 26226 - DNA, 19 bp, Homo sapiens
tcgggcggctcctgggcgg

SEQ ID NO: 26227 - DNA, 19 bp, Homo sapiens
tgcgggcggctcctgggcg

SEQ ID NO: 26228 - DNA, 19 bp, Homo sapiens
tcgcgggcggctcctgggc

SEQ ID NO: 26229 - DNA, 19 bp, Homo sapiens
tgcgcgggcggctcctggg

SEQ ID NO: 26230 - DNA, 19 bp, Homo sapiens
tagcgcgggcggctcctgg

SEQ ID NO: 26231 - DNA, 19 bp, Homo sapiens
tgagcgcgggcggctcctg

SEQ ID NO: 26232 - DNA, 19 bp, Homo sapiens
tggagcgcgggcggctcct

SEQ ID NO: 26233 - DNA, 19 bp, Homo sapiens
tgggagcgcgggcggctcc

SEQ ID NO: 26234 - DNA, 19 bp, Homo sapiens
tagggagcgcgggcggctc

SEQ ID NO: 26235 - DNA, 19 bp, Homo sapiens
tttcagggagcgcgggcgg

SEQ ID NO: 26236 - DNA, 19 bp, Homo sapiens
tgttcagggagcgcgggcg

SEQ ID NO: 26237 - DNA, 19 bp, Homo sapiens
tggttcagggagcgcgggc

SEQ ID NO: 26238 - DNA, 19 bp, Homo sapiens
tgggttcagggagcgcggg

SEQ ID NO: 26239 - DNA, 19 bp, Homo sapiens
ttagggttcagggagcgcg

SEQ ID NO: 26240 - DNA, 19 bp, Homo sapiens
tttctagggttcagggagc

SEQ ID NO: 26241 - DNA, 19 bp, Homo sapiens
tgttctagggttcagggag

SEQ ID NO: 26242 - DNA, 19 bp, Homo sapiens
tagttctagggttcaggga

SEQ ID NO: 26243 - DNA, 19 bp, Homo sapiens
tcagttctagggttcaggg

SEQ ID NO: 26244 - DNA, 19 bp, Homo sapiens
tacagttctagggttcagg

SEQ ID NO: 26245 - DNA, 19 bp, Homo sapiens
tgacagttctagggttcag

SEQ ID NO: 26246 - DNA, 19 bp, Homo sapiens
tagacagttctagggttca

SEQ ID NO: 26247 - DNA, 19 bp, Homo sapiens
taagacagttctagggttc

SEQ ID NO: 26248 - DNA, 19 bp, Homo sapiens
tgaagacagttctagggtt

SEQ ID NO: 26249 - DNA, 19 bp, Homo sapiens
ttcgaagacagttctaggg

SEQ ID NO: 26250 - DNA, 19 bp, Homo sapiens
tgtcgaagacagttctagg

SEQ ID NO: 26251 - DNA, 19 bp, Homo sapiens
tagtcgaagacagttctag

SEQ ID NO: 26252 - DNA, 19 bp, Homo sapiens
tgagtcgaagacagttcta

SEQ ID NO: 26253 - DNA, 19 bp, Homo sapiens
tggagtcgaagacagttct

SEQ ID NO: 26254 - DNA, 19 bp, Homo sapiens
tcggagtcgaagacagttc

SEQ ID NO: 26255 - DNA, 19 bp, Homo sapiens
tccggagtcgaagacagtt

SEQ ID NO: 26256 - DNA, 19 bp, Homo sapiens
tcccggagtcgaagacagt

SEQ ID NO: 26257 - DNA, 19 bp, Homo sapiens
tccccggagtcgaagacag

SEQ ID NO: 26258 - DNA, 19 bp, Homo sapiens
tgccccggagtcgaagaca

SEQ ID NO: 26259 - DNA, 19 bp, Homo sapiens
tggccccggagtcgaagac

SEQ ID NO: 26260 - DNA, 19 bp, Homo sapiens
tgggccccggagtcgaaga

SEQ ID NO: 26261 - DNA, 19 bp, Homo sapiens
tggggccccggagtcgaag

SEQ ID NO: 26262 - DNA, 19 bp, Homo sapiens
tcggggccccggagtcgaa

SEQ ID NO: 26263 - DNA, 19 bp, Homo sapiens
tacggggccccggagtcga

SEQ ID NO: 26264 - DNA, 19 bp, Homo sapiens
taacggggccccggagtcg

SEQ ID NO: 26265 - DNA, 19 bp, Homo sapiens
tcaacggggccccggagtc

SEQ ID NO: 26266 - DNA, 19 bp, Homo sapiens
tttccaacggggccccgga

SEQ ID NO: 26267 - DNA, 19 bp, Homo sapiens
ttcttccaacggggccccg

SEQ ID NO: 26268 - DNA, 19 bp, Homo sapiens
tgtcttccaacggggcccc

SEQ ID NO: 26269 - DNA, 19 bp, Homo sapiens
tagtcttccaacggggccc

SEQ ID NO: 26270 - DNA, 19 bp, Homo sapiens
ttcagtcttccaacggggc

SEQ ID NO: 26271 - DNA, 19 bp, Homo sapiens
tctcagtcttccaacgggg

SEQ ID NO: 26272 - DNA, 19 bp, Homo sapiens
tactcagtcttccaacggg

SEQ ID NO: 26273 - DNA, 19 bp, Homo sapiens
tcactcagtcttccaacgg

SEQ ID NO: 26274 - DNA, 19 bp, Homo sapiens
tgcactcagtcttccaacg

SEQ ID NO: 26275 - DNA, 19 bp, Homo sapiens
tggcactcagtcttccaac

SEQ ID NO: 26276 - DNA, 19 bp, Homo sapiens
tgggcactcagtcttccaa

SEQ ID NO: 26277 - DNA, 19 bp, Homo sapiens
tcgggcactcagtcttcca

SEQ ID NO: 26278 - DNA, 19 bp, Homo sapiens
tccgggcactcagtcttcc

SEQ ID NO: 26279 - DNA, 19 bp, Homo sapiens
tcccgggcactcagtcttc

SEQ ID NO: 26280 - DNA, 19 bp, Homo sapiens
tccccgggcactcagtctt

SEQ ID NO: 26281 - DNA, 19 bp, Homo sapiens
ttgccccgggcactcagtc

SEQ ID NO: 26282 - DNA, 19 bp, Homo sapiens
tgtgccccgggcactcagt

SEQ ID NO: 26283 - DNA, 19 bp, Homo sapiens
tcgtgccccgggcactcag

SEQ ID NO: 26284 - DNA, 19 bp, Homo sapiens
tccgtgccccgggcactca

SEQ ID NO: 26285 - DNA, 19 bp, Homo sapiens
ttgccgtgccccgggcact

SEQ ID NO: 26286 - DNA, 19 bp, Homo sapiens
ttgtgccgtgccccgggca

SEQ ID NO: 26287 - DNA, 19 bp, Homo sapiens
tttctgtgccgtgccccgg

SEQ ID NO: 26288 - DNA, 19 bp, Homo sapiens
tcttctgtgccgtgccccg

SEQ ID NO: 26289 - DNA, 19 bp, Homo sapiens
tgcttctgtgccgtgcccc

SEQ ID NO: 26290 - DNA, 19 bp, Homo sapiens
tggcttctgtgccgtgccc

SEQ ID NO: 26291 - DNA, 19 bp, Homo sapiens
tcggcttctgtgccgtgcc

SEQ ID NO: 26292 - DNA, 19 bp, Homo sapiens
tgcggcttctgtgccgtgc

SEQ ID NO: 26293 - DNA, 19 bp, Homo sapiens
tcgcggcttctgtgccgtg

SEQ ID NO: 26294 - DNA, 19 bp, Homo sapiens
tgcgcggcttctgtgccgt

SEQ ID NO: 26295 - DNA, 19 bp, Homo sapiens
tggcgcggcttctgtgccg

SEQ ID NO: 26296 - DNA, 19 bp, Homo sapiens
ttgggcgcggcttctgtgc

SEQ ID NO: 26297 - DNA, 19 bp, Homo sapiens
tgtgggcgcggcttctgtg

SEQ ID NO: 26298 - DNA, 19 bp, Homo sapiens
tggtgggcgcggcttctgt

SEQ ID NO: 26299 - DNA, 19 bp, Homo sapiens
tcggtgggcgcggcttctg

SEQ ID NO: 26300 - DNA, 19 bp, Homo sapiens
tgcggtgggcgcggcttct

SEQ ID NO: 26301 - DNA, 19 bp, Homo sapiens
tggcggtgggcgcggcttc

SEQ ID NO: 26302 - DNA, 19 bp, Homo sapiens
taggcggtgggcgcggctt

SEQ ID NO: 26303 - DNA, 19 bp, Homo sapiens
tcaggcggtgggcgcggct

SEQ ID NO: 26304 - DNA, 19 bp, Homo sapiens
tgcaggcggtgggcgcggc

SEQ ID NO: 26305 - DNA, 19 bp, Homo sapiens
ttggcaggcggtgggcgcg

SEQ ID NO: 26306 - DNA, 19 bp, Homo sapiens
tctggcaggcggtgggcgc

SEQ ID NO: 26307 - DNA, 19 bp, Homo sapiens
tactggcaggcggtgggcg

SEQ ID NO: 26308 - DNA, 19 bp, Homo sapiens
taactggcaggcggtgggc

SEQ ID NO: 26309 - DNA, 19 bp, Homo sapiens
ttgaactggcaggcggtgg

SEQ ID NO: 26310 - DNA, 19 bp, Homo sapiens
tttgtgaactggcaggcgg

SEQ ID NO: 26311 - DNA, 19 bp, Homo sapiens
tgttgtgaactggcaggcg

SEQ ID NO: 26312 - DNA, 19 bp, Homo sapiens
tggttgtgaactggcaggc

SEQ ID NO: 26313 - DNA, 19 bp, Homo sapiens
tcggttgtgaactggcagg

SEQ ID NO: 26314 - DNA, 19 bp, Homo sapiens
tgcggttgtgaactggcag

SEQ ID NO: 26315 - DNA, 19 bp, Homo sapiens
tagcggttgtgaactggca

SEQ ID NO: 26316 - DNA, 19 bp, Homo sapiens
tgagcggttgtgaactggc

SEQ ID NO: 26317 - DNA, 19 bp, Homo sapiens
tggagcggttgtgaactgg

SEQ ID NO: 26318 - DNA, 19 bp, Homo sapiens
ttcggagcggttgtgaact

SEQ ID NO: 26319 - DNA, 19 bp, Homo sapiens
tctcggagcggttgtgaac

SEQ ID NO: 26320 - DNA, 19 bp, Homo sapiens
tgctcggagcggttgtgaa

SEQ ID NO: 26321 - DNA, 19 bp, Homo sapiens
tcgctcggagcggttgtga

SEQ ID NO: 26322 - DNA, 19 bp, Homo sapiens
tacgctcggagcggttgtg

SEQ ID NO: 26323 - DNA, 19 bp, Homo sapiens
tcacgctcggagcggttgt

SEQ ID NO: 26324 - DNA, 19 bp, Homo sapiens
tccacgctcggagcggttg

SEQ ID NO: 26325 - DNA, 19 bp, Homo sapiens
tcccacgctcggagcggtt

SEQ ID NO: 26326 - DNA, 19 bp, Homo sapiens
tacccacgctcggagcggt

SEQ ID NO: 26327 - DNA, 19 bp, Homo sapiens
tgacccacgctcggagcgg

SEQ ID NO: 26328 - DNA, 19 bp, Homo sapiens
tagacccacgctcggagcg

SEQ ID NO: 26329 - DNA, 19 bp, Homo sapiens
tgagacccacgctcggagc

SEQ ID NO: 26330 - DNA, 19 bp, Homo sapiens
tggagacccacgctcggag

SEQ ID NO: 26331 - DNA, 19 bp, Homo sapiens
tcggagacccacgctcgga

SEQ ID NO: 26332 - DNA, 19 bp, Homo sapiens
tgcggagacccacgctcgg

SEQ ID NO: 26333 - DNA, 19 bp, Homo sapiens
tggcggagacccacgctcg

SEQ ID NO: 26334 - DNA, 19 bp, Homo sapiens
ttgggcggagacccacgct

SEQ ID NO: 26335 - DNA, 19 bp, Homo sapiens
tctgggcggagacccacgc

SEQ ID NO: 26336 - DNA, 19 bp, Homo sapiens
tgctgggcggagacccacg

SEQ ID NO: 26337 - DNA, 19 bp, Homo sapiens
tagctgggcggagacccac

SEQ ID NO: 26338 - DNA, 19 bp, Homo sapiens
tgagctgggcggagaccca

SEQ ID NO: 26339 - DNA, 19 bp, Homo sapiens
ttggagctgggcggagacc

SEQ ID NO: 26340 - DNA, 19 bp, Homo sapiens
tctggagctgggcggagac

SEQ ID NO: 26341 - DNA, 19 bp, Homo sapiens
tactggagctgggcggaga

SEQ ID NO: 26342 - DNA, 19 bp, Homo sapiens
tgactggagctgggcggag

SEQ ID NO: 26343 - DNA, 19 bp, Homo sapiens
tggactggagctgggcgga

SEQ ID NO: 26344 - DNA, 19 bp, Homo sapiens
taggactggagctgggcgg

SEQ ID NO: 26345 - DNA, 19 bp, Homo sapiens
tcaggactggagctgggcg

SEQ ID NO: 26346 - DNA, 19 bp, Homo sapiens
tacaggactggagctgggc

SEQ ID NO: 26347 - DNA, 19 bp, Homo sapiens
ttcacaggactggagctgg

SEQ ID NO: 26348 - DNA, 19 bp, Homo sapiens
tatcacaggactggagctg

SEQ ID NO: 26349 - DNA, 19 bp, Homo sapiens
tgatcacaggactggagct

SEQ ID NO: 26350 - DNA, 19 bp, Homo sapiens
tggatcacaggactggagc

SEQ ID NO: 26351 - DNA, 19 bp, Homo sapiens
tcggatcacaggactggag

SEQ ID NO: 26352 - DNA, 19 bp, Homo sapiens
tccggatcacaggactgga

SEQ ID NO: 26353 - DNA, 19 bp, Homo sapiens
tcccggatcacaggactgg

SEQ ID NO: 26354 - DNA, 19 bp, Homo sapiens
tgcccggatcacaggactg

SEQ ID NO: 26355 - DNA, 19 bp, Homo sapiens
tggcccggatcacaggact

SEQ ID NO: 26356 - DNA, 19 bp, Homo sapiens
tgggcccggatcacaggac

SEQ ID NO: 26357 - DNA, 19 bp, Homo sapiens
tcgggcccggatcacagga

SEQ ID NO: 26358 - DNA, 19 bp, Homo sapiens
tgcgggcccggatcacagg

SEQ ID NO: 26359 - DNA, 19 bp, Homo sapiens
tggcgggcccggatcacag

SEQ ID NO: 26360 - DNA, 19 bp, Homo sapiens
tgggcgggcccggatcaca

SEQ ID NO: 26361 - DNA, 19 bp, Homo sapiens
tggggcgggcccggatcac

SEQ ID NO: 26362 - DNA, 19 bp, Homo sapiens
tgggggcgggcccggatca

SEQ ID NO: 26363 - DNA, 19 bp, Homo sapiens
ttagggggcgggcccggat

SEQ ID NO: 26364 - DNA, 19 bp, Homo sapiens
tctagggggcgggcccgga

SEQ ID NO: 26365 - DNA, 19 bp, Homo sapiens
tgctagggggcgggcccgg

SEQ ID NO: 26366 - DNA, 19 bp, Homo sapiens
tcgctagggggcgggcccg

SEQ ID NO: 26367 - DNA, 19 bp, Homo sapiens
tccgctagggggcgggccc

SEQ ID NO: 26368 - DNA, 19 bp, Homo sapiens
tgccgctagggggcgggcc

SEQ ID NO: 26369 - DNA, 19 bp, Homo sapiens
tggccgctagggggcgggc

SEQ ID NO: 26370 - DNA, 19 bp, Homo sapiens
tcggccgctagggggcggg

SEQ ID NO: 26371 - DNA, 19 bp, Homo sapiens
tccggccgctagggggcgg

SEQ ID NO: 26372 - DNA, 19 bp, Homo sapiens
tcccggccgctagggggcg

SEQ ID NO: 26373 - DNA, 19 bp, Homo sapiens
ttccccggccgctaggggg

SEQ ID NO: 26374 - DNA, 19 bp, Homo sapiens
tctccccggccgctagggg

SEQ ID NO: 26375 - DNA, 19 bp, Homo sapiens
tcctccccggccgctaggg

SEQ ID NO: 26376 - DNA, 19 bp, Homo sapiens
ttccctccccggccgctag

SEQ ID NO: 26377 - DNA, 19 bp, Homo sapiens
tctccctccccggccgcta

SEQ ID NO: 26378 - DNA, 19 bp, Homo sapiens
tcctccctccccggccgct

SEQ ID NO: 26379 - DNA, 19 bp, Homo sapiens
tccctccctccccggccgc

SEQ ID NO: 26380 - DNA, 19 bp, Homo sapiens
tcccctccctccccggccg

SEQ ID NO: 26381 - DNA, 19 bp, Homo sapiens
tgcccctccctccccggcc

SEQ ID NO: 26382 - DNA, 19 bp, Homo sapiens
tggcccctccctccccggc

SEQ ID NO: 26383 - DNA, 19 bp, Homo sapiens
tcggcccctccctccccgg

SEQ ID NO: 26384 - DNA, 19 bp, Homo sapiens
tccggcccctccctccccg

SEQ ID NO: 26385 - DNA, 19 bp, Homo sapiens
tcccggcccctccctcccc

SEQ ID NO: 26386 - DNA, 19 bp, Homo sapiens
tacccggcccctccctccc

SEQ ID NO: 26387 - DNA, 19 bp, Homo sapiens
tgacccggcccctccctcc

SEQ ID NO: 26388 - DNA, 19 bp, Homo sapiens
tggacccggcccctccctc

SEQ ID NO: 26389 - DNA, 19 bp, Homo sapiens
tcggacccggcccctccct

SEQ ID NO: 26390 - DNA, 19 bp, Homo sapiens
tgcggacccggcccctccc

SEQ ID NO: 26391 - DNA, 19 bp, Homo sapiens
tcgcggacccggcccctcc

SEQ ID NO: 26392 - DNA, 19 bp, Homo sapiens
tccgcggacccggcccctc

SEQ ID NO: 26393 - DNA, 19 bp, Homo sapiens
tgccgcggacccggcccct

SEQ ID NO: 26394 - DNA, 19 bp, Homo sapiens
tggccgcggacccggcccc

SEQ ID NO: 26395 - DNA, 19 bp, Homo sapiens
tcggccgcggacccggccc

SEQ ID NO: 26396 - DNA, 19 bp, Homo sapiens
tccggccgcggacccggcc

SEQ ID NO: 26397 - DNA, 19 bp, Homo sapiens
tgccggccgcggacccggc

SEQ ID NO: 26398 - DNA, 19 bp, Homo sapiens
tttcgccggccgcggaccc

SEQ ID NO: 26399 - DNA, 19 bp, Homo sapiens
tgttcgccggccgcggacc

SEQ ID NO: 26400 - DNA, 19 bp, Homo sapiens
tcgttcgccggccgcggac

SEQ ID NO: 26401 - DNA, 19 bp, Homo sapiens
tccgttcgccggccgcgga

SEQ ID NO: 26402 - DNA, 19 bp, Homo sapiens
tcccgttcgccggccgcgg

SEQ ID NO: 26403 - DNA, 19 bp, Homo sapiens
tccccgttcgccggccgcg

SEQ ID NO: 26404 - DNA, 19 bp, Homo sapiens
tgccccgttcgccggccgc

SEQ ID NO: 26405 - DNA, 19 bp, Homo sapiens
tagccccgttcgccggccg

SEQ ID NO: 26406 - DNA, 19 bp, Homo sapiens
tgagccccgttcgccggcc

SEQ ID NO: 26407 - DNA, 19 bp, Homo sapiens
tttcgagccccgttcgccg

SEQ ID NO: 26408 - DNA, 19 bp, Homo sapiens
tcttcgagccccgttcgcc

SEQ ID NO: 26409 - DNA, 19 bp, Homo sapiens
tccttcgagccccgttcgc

SEQ ID NO: 26410 - DNA, 19 bp, Homo sapiens
tcccttcgagccccgttcg

SEQ ID NO: 26411 - DNA, 19 bp, Homo sapiens
tacccttcgagccccgttc

SEQ ID NO: 26412 - DNA, 19 bp, Homo sapiens
tgacccttcgagccccgtt

SEQ ID NO: 26413 - DNA, 19 bp, Homo sapiens
tggacccttcgagccccgt

SEQ ID NO: 26414 - DNA, 19 bp, Homo sapiens
taggacccttcgagccccg

SEQ ID NO: 26415 - DNA, 19 bp, Homo sapiens
taaggacccttcgagcccc

SEQ ID NO: 26416 - DNA, 19 bp, Homo sapiens
tcaaggacccttcgagccc

SEQ ID NO: 26417 - DNA, 19 bp, Homo sapiens
ttacaaggacccttcgagc

SEQ ID NO: 26418 - DNA, 19 bp, Homo sapiens
tctacaaggacccttcgag

SEQ ID NO: 26419 - DNA, 19 bp, Homo sapiens
tgctacaaggacccttcga

SEQ ID NO: 26420 - DNA, 19 bp, Homo sapiens
tggctacaaggacccttcg

SEQ ID NO: 26421 - DNA, 19 bp, Homo sapiens
tcggctacaaggacccttc

SEQ ID NO: 26422 - DNA, 19 bp, Homo sapiens
tccggctacaaggaccctt

SEQ ID NO: 26423 - DNA, 19 bp, Homo sapiens
tttcccggctacaaggacc

SEQ ID NO: 26424 - DNA, 19 bp, Homo sapiens
tattcccggctacaaggac

SEQ ID NO: 26425 - DNA, 19 bp, Homo sapiens
tcattcccggctacaagga

SEQ ID NO: 26426 - DNA, 19 bp, Homo sapiens
tgcattcccggctacaagg

SEQ ID NO: 26427 - DNA, 19 bp, Homo sapiens
tagcattcccggctacaag

SEQ ID NO: 26428 - DNA, 19 bp, Homo sapiens
tcagcattcccggctacaa

SEQ ID NO: 26429 - DNA, 19 bp, Homo sapiens
tgcagcattcccggctaca

SEQ ID NO: 26430 - DNA, 19 bp, Homo sapiens
tagcagcattcccggctac

SEQ ID NO: 26431 - DNA, 19 bp, Homo sapiens
tcagcagcattcccggcta

SEQ ID NO: 26432 - DNA, 19 bp, Homo sapiens
tgcagcagcattcccggct

SEQ ID NO: 26433 - DNA, 19 bp, Homo sapiens
tagcagcagcattcccggc

SEQ ID NO: 26434 - DNA, 19 bp, Homo sapiens
tcagcagcagcattcccgg

SEQ ID NO: 26435 - DNA, 19 bp, Homo sapiens
tgcagcagcagcattcccg

SEQ ID NO: 26436 - DNA, 19 bp, Homo sapiens
tagcagcagcagcattccc

SEQ ID NO: 26437 - DNA, 19 bp, Homo sapiens
tcagcagcagcagcattcc

SEQ ID NO: 26438 - DNA, 19 bp, Homo sapiens
tgcagcagcagcagcattc

SEQ ID NO: 26439 - DNA, 19 bp, Homo sapiens
tagcagcagcagcagcatt

SEQ ID NO: 26440 - DNA, 19 bp, Homo sapiens
tcagcagcagcagcagcat

SEQ ID NO: 26441 - DNA, 19 bp, Homo sapiens
tcagcagcagcagcagcag

SEQ ID NO: 26442 - DNA, 19 bp, Homo sapiens
tccagcagcagcagcagca

SEQ ID NO: 26443 - DNA, 19 bp, Homo sapiens
tcccagcagcagcagcagc

SEQ ID NO: 26444 - DNA, 19 bp, Homo sapiens
tccccagcagcagcagcag

SEQ ID NO: 26445 - DNA, 19 bp, Homo sapiens
tcccccagcagcagcagca

SEQ ID NO: 26446 - DNA, 19 bp, Homo sapiens
ttccccccagcagcagcag

SEQ ID NO: 26447 - DNA, 19 bp, Homo sapiens
tatccccccagcagcagca

SEQ ID NO: 26448 - DNA, 19 bp, Homo sapiens
ttgatccccccagcagcag

SEQ ID NO: 26449 - DNA, 19 bp, Homo sapiens
ttgtgatccccccagcagc

SEQ ID NO: 26450 - DNA, 19 bp, Homo sapiens
ttctgtgatccccccagca

SEQ ID NO: 26451 - DNA, 19 bp, Homo sapiens
tgtctgtgatccccccagc

SEQ ID NO: 26452 - DNA, 19 bp, Homo sapiens
ttggtctgtgatcccccca

SEQ ID NO: 26453 - DNA, 19 bp, Homo sapiens
tatggtctgtgatcccccc

SEQ ID NO: 26454 - DNA, 19 bp, Homo sapiens
taatggtctgtgatccccc

SEQ ID NO: 26455 - DNA, 19 bp, Homo sapiens
taaatggtctgtgatcccc

SEQ ID NO: 26456 - DNA, 19 bp, Homo sapiens
tgaaatggtctgtgatccc

SEQ ID NO: 26457 - DNA, 19 bp, Homo sapiens
tagaaatggtctgtgatcc

SEQ ID NO: 26458 - DNA, 19 bp, Homo sapiens
taagaaatggtctgtgatc

SEQ ID NO: 26459 - DNA, 19 bp, Homo sapiens
taaagaaatggtctgtgat

SEQ ID NO: 26460 - DNA, 19 bp, Homo sapiens
tgaaagaaatggtctgtga

SEQ ID NO: 26461 - DNA, 19 bp, Homo sapiens
tagaaagaaatggtctgtg

SEQ ID NO: 26462 - DNA, 19 bp, Homo sapiens
taagaaagaaatggtctgt

SEQ ID NO: 26463 - DNA, 19 bp, Homo sapiens
taaagaaagaaatggtctg

SEQ ID NO: 26464 - DNA, 19 bp, Homo sapiens
tgaaagaaagaaatggtct

SEQ ID NO: 26465 - DNA, 19 bp, Homo sapiens
tcgaaagaaagaaatggtc

SEQ ID NO: 26466 - DNA, 19 bp, Homo sapiens
tccgaaagaaagaaatggt

SEQ ID NO: 26467 - DNA, 19 bp, Homo sapiens
tgccgaaagaaagaaatgg

SEQ ID NO: 26468 - DNA, 19 bp, Homo sapiens
ttggccgaaagaaagaaat

SEQ ID NO: 26469 - DNA, 19 bp, Homo sapiens
tctggccgaaagaaagaaa

SEQ ID NO: 26470 - DNA, 19 bp, Homo sapiens
tcctggccgaaagaaagaa

SEQ ID NO: 26471 - DNA, 19 bp, Homo sapiens
tgcctggccgaaagaaaga

SEQ ID NO: 26472 - DNA, 19 bp, Homo sapiens
tagcctggccgaaagaaag

SEQ ID NO: 26473 - DNA, 19 bp, Homo sapiens
ttcagcctggccgaaagaa

SEQ ID NO: 26474 - DNA, 19 bp, Homo sapiens
tctcagcctggccgaaaga

SEQ ID NO: 26475 - DNA, 19 bp, Homo sapiens
tcctcagcctggccgaaag

SEQ ID NO: 26476 - DNA, 19 bp, Homo sapiens
tgcctcagcctggccgaaa

SEQ ID NO: 26477 - DNA, 19 bp, Homo sapiens
tggcctcagcctggccgaa

SEQ ID NO: 26478 - DNA, 19 bp, Homo sapiens
tgggcctcagcctggccga

SEQ ID NO: 26479 - DNA, 19 bp, Homo sapiens
tagggcctcagcctggccg

SEQ ID NO: 26480 - DNA, 19 bp, Homo sapiens
ttcagggcctcagcctggc

SEQ ID NO: 26481 - DNA, 19 bp, Homo sapiens
tgtcagggcctcagcctgg

SEQ ID NO: 26482 - DNA, 19 bp, Homo sapiens
tcgtcagggcctcagcctg

SEQ ID NO: 26483 - DNA, 19 bp, Homo sapiens
tacgtcagggcctcagcct

SEQ ID NO: 26484 - DNA, 19 bp, Homo sapiens
tcacgtcagggcctcagcc

SEQ ID NO: 26485 - DNA, 19 bp, Homo sapiens
ttccacgtcagggcctcag

SEQ ID NO: 26486 - DNA, 19 bp, Homo sapiens
tatccacgtcagggcctca

SEQ ID NO: 26487 - DNA, 19 bp, Homo sapiens
tcatccacgtcagggcctc

SEQ ID NO: 26488 - DNA, 19 bp, Homo sapiens
tccatccacgtcagggcct

SEQ ID NO: 26489 - DNA, 19 bp, Homo sapiens
tcccatccacgtcagggcc

SEQ ID NO: 26490 - DNA, 19 bp, Homo sapiens
ttttgcccatccacgtcag

SEQ ID NO: 26491 - DNA, 19 bp, Homo sapiens
tgtttgcccatccacgtca

SEQ ID NO: 26492 - DNA, 19 bp, Homo sapiens
tagtttgcccatccacgtc

SEQ ID NO: 26493 - DNA, 19 bp, Homo sapiens
tcagtttgcccatccacgt

SEQ ID NO: 26494 - DNA, 19 bp, Homo sapiens
ttgcagtttgcccatccac

SEQ ID NO: 26495 - DNA, 19 bp, Homo sapiens
tctgcagtttgcccatcca

SEQ ID NO: 26496 - DNA, 19 bp, Homo sapiens
tcctgcagtttgcccatcc

SEQ ID NO: 26497 - DNA, 19 bp, Homo sapiens
tgcctgcagtttgcccatc

SEQ ID NO: 26498 - DNA, 19 bp, Homo sapiens
tggcctgcagtttgcccat

SEQ ID NO: 26499 - DNA, 19 bp, Homo sapiens
taggcctgcagtttgccca

SEQ ID NO: 26500 - DNA, 19 bp, Homo sapiens
tcaggcctgcagtttgccc

SEQ ID NO: 26501 - DNA, 19 bp, Homo sapiens
tccaggcctgcagtttgcc

SEQ ID NO: 26502 - DNA, 19 bp, Homo sapiens
tttcccaggcctgcagttt

SEQ ID NO: 26503 - DNA, 19 bp, Homo sapiens
tcttcccaggcctgcagtt

SEQ ID NO: 26504 - DNA, 19 bp, Homo sapiens
tccttcccaggcctgcagt

SEQ ID NO: 26505 - DNA, 19 bp, Homo sapiens
ttgccttcccaggcctgca

SEQ ID NO: 26506 - DNA, 19 bp, Homo sapiens
tctgccttcccaggcctgc

SEQ ID NO: 26507 - DNA, 19 bp, Homo sapiens
tttgctgccttcccaggcc

SEQ ID NO: 26508 - DNA, 19 bp, Homo sapiens
tcttgctgccttcccaggc

SEQ ID NO: 26509 - DNA, 19 bp, Homo sapiens
tgcttgctgccttcccagg

SEQ ID NO: 26510 - DNA, 19 bp, Homo sapiens
tggcttgctgccttcccag

SEQ ID NO: 26511 - DNA, 19 bp, Homo sapiens
tcggcttgctgccttccca

SEQ ID NO: 26512 - DNA, 19 bp, Homo sapiens
tccggcttgctgccttccc

SEQ ID NO: 26513 - DNA, 19 bp, Homo sapiens
tcccggcttgctgccttcc

SEQ ID NO: 26514 - DNA, 19 bp, Homo sapiens
tgcccggcttgctgccttc

SEQ ID NO: 26515 - DNA, 19 bp, Homo sapiens
tggcccggcttgctgcctt

SEQ ID NO: 26516 - DNA, 19 bp, Homo sapiens
tcggcccggcttgctgcct

SEQ ID NO: 26517 - DNA, 19 bp, Homo sapiens
tacggcccggcttgctgcc

SEQ ID NO: 26518 - DNA, 19 bp, Homo sapiens
tgacggcccggcttgctgc

SEQ ID NO: 26519 - DNA, 19 bp, Homo sapiens
tggacggcccggcttgctg

SEQ ID NO: 26520 - DNA, 19 bp, Homo sapiens
tcggacggcccggcttgct

SEQ ID NO: 26521 - DNA, 19 bp, Homo sapiens
tacggacggcccggcttgc

SEQ ID NO: 26522 - DNA, 19 bp, Homo sapiens
tcacggacggcccggcttg

SEQ ID NO: 26523 - DNA, 19 bp, Homo sapiens
tacacggacggcccggctt

SEQ ID NO: 26524 - DNA, 19 bp, Homo sapiens
taacacggacggcccggct

SEQ ID NO: 26525 - DNA, 19 bp, Homo sapiens
tgaacacggacggcccggc

SEQ ID NO: 26526 - DNA, 19 bp, Homo sapiens
ttggaacacggacggcccg

SEQ ID NO: 26527 - DNA, 19 bp, Homo sapiens
tatggaacacggacggccc

SEQ ID NO: 26528 - DNA, 19 bp, Homo sapiens
tgatggaacacggacggcc

SEQ ID NO: 26529 - DNA, 19 bp, Homo sapiens
tggatggaacacggacggc

SEQ ID NO: 26530 - DNA, 19 bp, Homo sapiens
taggatggaacacggacgg

SEQ ID NO: 26531 - DNA, 19 bp, Homo sapiens
tgaggatggaacacggacg

SEQ ID NO: 26532 - DNA, 19 bp, Homo sapiens
ttggaggatggaacacgga

SEQ ID NO: 26533 - DNA, 19 bp, Homo sapiens
tgtggaggatggaacacgg

SEQ ID NO: 26534 - DNA, 19 bp, Homo sapiens
tcgtggaggatggaacacg

SEQ ID NO: 26535 - DNA, 19 bp, Homo sapiens
ttgcgtggaggatggaaca

SEQ ID NO: 26536 - DNA, 19 bp, Homo sapiens
tgtgcgtggaggatggaac

SEQ ID NO: 26537 - DNA, 19 bp, Homo sapiens
tggtgcgtggaggatggaa

SEQ ID NO: 26538 - DNA, 19 bp, Homo sapiens
tgggtgcgtggaggatgga

SEQ ID NO: 26539 - DNA, 19 bp, Homo sapiens
tggggtgcgtggaggatgg

SEQ ID NO: 26540 - DNA, 19 bp, Homo sapiens
ttgggggtgcgtggaggat

SEQ ID NO: 26541 - DNA, 19 bp, Homo sapiens
tgtgggggtgcgtggagga

SEQ ID NO: 26542 - DNA, 19 bp, Homo sapiens
tggtgggggtgcgtggagg

SEQ ID NO: 26543 - DNA, 19 bp, Homo sapiens
ttaggtgggggtgcgtgga

SEQ ID NO: 26544 - DNA, 19 bp, Homo sapiens
tataggtgggggtgcgtgg

SEQ ID NO: 26545 - DNA, 19 bp, Homo sapiens
tgataggtgggggtgcgtg

SEQ ID NO: 26546 - DNA, 19 bp, Homo sapiens
tcgataggtgggggtgcgt

SEQ ID NO: 26547 - DNA, 19 bp, Homo sapiens
tacgataggtgggggtgcg

SEQ ID NO: 26548 - DNA, 19 bp, Homo sapiens
taacgataggtgggggtgc

SEQ ID NO: 26549 - DNA, 19 bp, Homo sapiens
tcaacgataggtgggggtg

SEQ ID NO: 26550 - DNA, 19 bp, Homo sapiens
tccaacgataggtgggggt

SEQ ID NO: 26551 - DNA, 19 bp, Homo sapiens
taccaacgataggtggggg

SEQ ID NO: 26552 - DNA, 19 bp, Homo sapiens
taaccaacgataggtgggg

SEQ ID NO: 26553 - DNA, 19 bp, Homo sapiens
tgaaccaacgataggtggg

SEQ ID NO: 26554 - DNA, 19 bp, Homo sapiens
tcgaaccaacgataggtgg

SEQ ID NO: 26555 - DNA, 19 bp, Homo sapiens
ttttgcgaaccaacgatag

SEQ ID NO: 26556 - DNA, 19 bp, Homo sapiens
tctttgcgaaccaacgata

SEQ ID NO: 26557 - DNA, 19 bp, Homo sapiens
tactttgcgaaccaacgat

SEQ ID NO: 26558 - DNA, 19 bp, Homo sapiens
tcactttgcgaaccaacga

SEQ ID NO: 26559 - DNA, 19 bp, Homo sapiens
ttttgcactttgcgaacca

SEQ ID NO: 26560 - DNA, 19 bp, Homo sapiens
tctttgcactttgcgaacc

SEQ ID NO: 26561 - DNA, 19 bp, Homo sapiens
tgctttgcactttgcgaac

SEQ ID NO: 26562 - DNA, 19 bp, Homo sapiens
tagctttgcactttgcgaa

SEQ ID NO: 26563 - DNA, 19 bp, Homo sapiens
taagctttgcactttgcga

SEQ ID NO: 26564 - DNA, 19 bp, Homo sapiens
taaagctttgcactttgcg

SEQ ID NO: 26565 - DNA, 19 bp, Homo sapiens
tgaaagctttgcactttgc

SEQ ID NO: 26566 - DNA, 19 bp, Homo sapiens
tagaaagctttgcactttg

SEQ ID NO: 26567 - DNA, 19 bp, Homo sapiens
taagaaagctttgcacttt

SEQ ID NO: 26568 - DNA, 19 bp, Homo sapiens
tcaagaaagctttgcactt

SEQ ID NO: 26569 - DNA, 19 bp, Homo sapiens
tacaagaaagctttgcact

SEQ ID NO: 26570 - DNA, 19 bp, Homo sapiens
tcacaagaaagctttgcac

SEQ ID NO: 26571 - DNA, 19 bp, Homo sapiens
ttgcacaagaaagctttgc

SEQ ID NO: 26572 - DNA, 19 bp, Homo sapiens
tatgcacaagaaagctttg

SEQ ID NO: 26573 - DNA, 19 bp, Homo sapiens
ttcatgcacaagaaagctt

SEQ ID NO: 26574 - DNA, 19 bp, Homo sapiens
tgtcatgcacaagaaagct

SEQ ID NO: 26575 - DNA, 19 bp, Homo sapiens
tcgtcatgcacaagaaagc

SEQ ID NO: 26576 - DNA, 19 bp, Homo sapiens
tgcgtcatgcacaagaaag

SEQ ID NO: 26577 - DNA, 19 bp, Homo sapiens
tggcgtcatgcacaagaaa

SEQ ID NO: 26578 - DNA, 19 bp, Homo sapiens
tgggcgtcatgcacaagaa

SEQ ID NO: 26579 - DNA, 19 bp, Homo sapiens
tagggcgtcatgcacaaga

SEQ ID NO: 26580 - DNA, 19 bp, Homo sapiens
tcagggcgtcatgcacaag

SEQ ID NO: 26581 - DNA, 19 bp, Homo sapiens
tgcagggcgtcatgcacaa

SEQ ID NO: 26582 - DNA, 19 bp, Homo sapiens
tagcagggcgtcatgcaca

SEQ ID NO: 26583 - DNA, 19 bp, Homo sapiens
tgagcagggcgtcatgcac

SEQ ID NO: 26584 - DNA, 19 bp, Homo sapiens
tagagcagggcgtcatgca

SEQ ID NO: 26585 - DNA, 19 bp, Homo sapiens
tcagagcagggcgtcatgc

SEQ ID NO: 26586 - DNA, 19 bp, Homo sapiens
tccagagcagggcgtcatg

SEQ ID NO: 26587 - DNA, 19 bp, Homo sapiens
tcccagagcagggcgtcat

SEQ ID NO: 26588 - DNA, 19 bp, Homo sapiens
ttccccagagcagggcgtc

SEQ ID NO: 26589 - DNA, 19 bp, Homo sapiens
tctccccagagcagggcgt

SEQ ID NO: 26590 - DNA, 19 bp, Homo sapiens
tgctccccagagcagggcg

SEQ ID NO: 26591 - DNA, 19 bp, Homo sapiens
tcgctccccagagcagggc

SEQ ID NO: 26592 - DNA, 19 bp, Homo sapiens
tacgctccccagagcaggg

SEQ ID NO: 26593 - DNA, 19 bp, Homo sapiens
tgacgctccccagagcagg

SEQ ID NO: 26594 - DNA, 19 bp, Homo sapiens
tagacgctccccagagcag

SEQ ID NO: 26595 - DNA, 19 bp, Homo sapiens
tcagacgctccccagagca

SEQ ID NO: 26596 - DNA, 19 bp, Homo sapiens
tccagacgctccccagagc

SEQ ID NO: 26597 - DNA, 19 bp, Homo sapiens
tgccagacgctccccagag

SEQ ID NO: 26598 - DNA, 19 bp, Homo sapiens
tcgccagacgctccccaga

SEQ ID NO: 26599 - DNA, 19 bp, Homo sapiens
tgcgccagacgctccccag

SEQ ID NO: 26600 - DNA, 19 bp, Homo sapiens
ttcgcgccagacgctcccc

SEQ ID NO: 26601 - DNA, 19 bp, Homo sapiens
tatcgcgccagacgctccc

SEQ ID NO: 26602 - DNA, 19 bp, Homo sapiens
tgatcgcgccagacgctcc

SEQ ID NO: 26603 - DNA, 19 bp, Homo sapiens
tagatcgcgccagacgctc

SEQ ID NO: 26604 - DNA, 19 bp, Homo sapiens
tgagatcgcgccagacgct

SEQ ID NO: 26605 - DNA, 19 bp, Homo sapiens
tagagatcgcgccagacgc

SEQ ID NO: 26606 - DNA, 19 bp, Homo sapiens
tcagagatcgcgccagacg

SEQ ID NO: 26607 - DNA, 19 bp, Homo sapiens
tgcagagatcgcgccagac

SEQ ID NO: 26608 - DNA, 19 bp, Homo sapiens
tggcagagatcgcgccaga

SEQ ID NO: 26609 - DNA, 19 bp, Homo sapiens
taggcagagatcgcgccag

SEQ ID NO: 26610 - DNA, 19 bp, Homo sapiens
tcaggcagagatcgcgcca

SEQ ID NO: 26611 - DNA, 19 bp, Homo sapiens
tgcaggcagagatcgcgcc

SEQ ID NO: 26612 - DNA, 19 bp, Homo sapiens
tagcaggcagagatcgcgc

SEQ ID NO: 26613 - DNA, 19 bp, Homo sapiens
ttaagcaggcagagatcgc

SEQ ID NO: 26614 - DNA, 19 bp, Homo sapiens
tgtaagcaggcagagatcg

SEQ ID NO: 26615 - DNA, 19 bp, Homo sapiens
tagtaagcaggcagagatc

SEQ ID NO: 26616 - DNA, 19 bp, Homo sapiens
tgagtaagcaggcagagat

SEQ ID NO: 26617 - DNA, 19 bp, Homo sapiens
tcgagtaagcaggcagaga

SEQ ID NO: 26618 - DNA, 19 bp, Homo sapiens
tccgagtaagcaggcagag

SEQ ID NO: 26619 - DNA, 19 bp, Homo sapiens
ttttcccgagtaagcaggc

SEQ ID NO: 26620 - DNA, 19 bp, Homo sapiens
tatttcccgagtaagcagg

SEQ ID NO: 26621 - DNA, 19 bp, Homo sapiens
taatttcccgagtaagcag

SEQ ID NO: 26622 - DNA, 19 bp, Homo sapiens
taaatttcccgagtaagca

SEQ ID NO: 26623 - DNA, 19 bp, Homo sapiens
tcaaatttcccgagtaagc

SEQ ID NO: 26624 - DNA, 19 bp, Homo sapiens
tgcaaatttcccgagtaag

SEQ ID NO: 26625 - DNA, 19 bp, Homo sapiens
tagcaaatttcccgagtaa

SEQ ID NO: 26626 - DNA, 19 bp, Homo sapiens
taagcaaatttcccgagta

SEQ ID NO: 26627 - DNA, 19 bp, Homo sapiens
taaagcaaatttcccgagt

SEQ ID NO: 26628 - DNA, 19 bp, Homo sapiens
taaaagcaaatttcccgag

SEQ ID NO: 26629 - DNA, 19 bp, Homo sapiens
tcaaaagcaaatttcccga

SEQ ID NO: 26630 - DNA, 19 bp, Homo sapiens
tgcaaaagcaaatttcccg

SEQ ID NO: 26631 - DNA, 19 bp, Homo sapiens
ttttggcaaaagcaaattt

SEQ ID NO: 26632 - DNA, 19 bp, Homo sapiens
tgtttggcaaaagcaaatt

SEQ ID NO: 26633 - DNA, 19 bp, Homo sapiens
tggtttggcaaaagcaaat

SEQ ID NO: 26634 - DNA, 19 bp, Homo sapiens
tgggtttggcaaaagcaaa

SEQ ID NO: 26635 - DNA, 19 bp, Homo sapiens
tcgggtttggcaaaagcaa

SEQ ID NO: 26636 - DNA, 19 bp, Homo sapiens
tgcgggtttggcaaaagca

SEQ ID NO: 26637 - DNA, 19 bp, Homo sapiens
tagcgggtttggcaaaagc

SEQ ID NO: 26638 - DNA, 19 bp, Homo sapiens
taagcgggtttggcaaaag

SEQ ID NO: 26639 - DNA, 19 bp, Homo sapiens
taaagcgggtttggcaaaa

SEQ ID NO: 26640 - DNA, 19 bp, Homo sapiens
taaaagcgggtttggcaaa

SEQ ID NO: 26641 - DNA, 19 bp, Homo sapiens
taaaaagcgggtttggcaa

SEQ ID NO: 26642 - DNA, 19 bp, Homo sapiens
tgaaaaagcgggtttggca

SEQ ID NO: 26643 - DNA, 19 bp, Homo sapiens
tcgaaaaagcgggtttggc

SEQ ID NO: 26644 - DNA, 19 bp, Homo sapiens
tccgaaaaagcgggtttgg

SEQ ID NO: 26645 - DNA, 19 bp, Homo sapiens
tcccgaaaaagcgggtttg

SEQ ID NO: 26646 - DNA, 19 bp, Homo sapiens
ttccccgaaaaagcgggtt

SEQ ID NO: 26647 - DNA, 19 bp, Homo sapiens
tatccccgaaaaagcgggt

SEQ ID NO: 26648 - DNA, 19 bp, Homo sapiens
tgatccccgaaaaagcggg

SEQ ID NO: 26649 - DNA, 19 bp, Homo sapiens
tggatccccgaaaaagcgg

SEQ ID NO: 26650 - DNA, 19 bp, Homo sapiens
tgggatccccgaaaaagcg

SEQ ID NO: 26651 - DNA, 19 bp, Homo sapiens
tcgggatccccgaaaaagc

SEQ ID NO: 26652 - DNA, 19 bp, Homo sapiens
tgcgggatccccgaaaaag

SEQ ID NO: 26653 - DNA, 19 bp, Homo sapiens
tcgcgggatccccgaaaaa

SEQ ID NO: 26654 - DNA, 19 bp, Homo sapiens
tgcgcgggatccccgaaaa

SEQ ID NO: 26655 - DNA, 19 bp, Homo sapiens
tggcgcgggatccccgaaa

SEQ ID NO: 26656 - DNA, 19 bp, Homo sapiens
tgggcgcgggatccccgaa

SEQ ID NO: 26657 - DNA, 19 bp, Homo sapiens
tggggcgcgggatccccga

SEQ ID NO: 26658 - DNA, 19 bp, Homo sapiens
tgggggcgcgggatccccg

SEQ ID NO: 26659 - DNA, 19 bp, Homo sapiens
tggggggcgcgggatcccc

SEQ ID NO: 26660 - DNA, 19 bp, Homo sapiens
taggggggcgcgggatccc

SEQ ID NO: 26661 - DNA, 19 bp, Homo sapiens
tgaggggggcgcgggatcc

SEQ ID NO: 26662 - DNA, 19 bp, Homo sapiens
tggaggggggcgcgggatc

SEQ ID NO: 26663 - DNA, 19 bp, Homo sapiens
taggaggggggcgcgggat

SEQ ID NO: 26664 - DNA, 19 bp, Homo sapiens
ttgaggaggggggcgcggg

SEQ ID NO: 26665 - DNA, 19 bp, Homo sapiens
tgtgaggaggggggcgcgg

SEQ ID NO: 26666 - DNA, 19 bp, Homo sapiens
tagtgaggaggggggcgcg

SEQ ID NO: 26667 - DNA, 19 bp, Homo sapiens
taagtgaggaggggggcgc

SEQ ID NO: 26668 - DNA, 19 bp, Homo sapiens
tcaagtgaggaggggggcg

SEQ ID NO: 26669 - DNA, 19 bp, Homo sapiens
tgcaagtgaggaggggggc

SEQ ID NO: 26670 - DNA, 19 bp, Homo sapiens
tcgcaagtgaggagggggg

SEQ ID NO: 26671 - DNA, 19 bp, Homo sapiens
tgcgcaagtgaggaggggg

SEQ ID NO: 26672 - DNA, 19 bp, Homo sapiens
tagcgcaagtgaggagggg

SEQ ID NO: 26673 - DNA, 19 bp, Homo sapiens
tcagcgcaagtgaggaggg

SEQ ID NO: 26674 - DNA, 19 bp, Homo sapiens
tgcagcgcaagtgaggagg

SEQ ID NO: 26675 - DNA, 19 bp, Homo sapiens
tagcagcgcaagtgaggag

SEQ ID NO: 26676 - DNA, 19 bp, Homo sapiens
tgagcagcgcaagtgagga

SEQ ID NO: 26677 - DNA, 19 bp, Homo sapiens
tagagcagcgcaagtgagg

SEQ ID NO: 26678 - DNA, 19 bp, Homo sapiens
tgagagcagcgcaagtgag

SEQ ID NO: 26679 - DNA, 19 bp, Homo sapiens
tcgagagcagcgcaagtga

SEQ ID NO: 26680 - DNA, 19 bp, Homo sapiens
ttccgagagcagcgcaagt

SEQ ID NO: 26681 - DNA, 19 bp, Homo sapiens
tctccgagagcagcgcaag

SEQ ID NO: 26682 - DNA, 19 bp, Homo sapiens
tgctccgagagcagcgcaa

SEQ ID NO: 26683 - DNA, 19 bp, Homo sapiens
tggctccgagagcagcgca

SEQ ID NO: 26684 - DNA, 19 bp, Homo sapiens
tgggctccgagagcagcgc

SEQ ID NO: 26685 - DNA, 19 bp, Homo sapiens
ttggggctccgagagcagc

SEQ ID NO: 26686 - DNA, 19 bp, Homo sapiens
tctggggctccgagagcag

SEQ ID NO: 26687 - DNA, 19 bp, Homo sapiens
tgctggggctccgagagca

SEQ ID NO: 26688 - DNA, 19 bp, Homo sapiens
tggctggggctccgagagc

SEQ ID NO: 26689 - DNA, 19 bp, Homo sapiens
tcggctggggctccgagag

SEQ ID NO: 26690 - DNA, 19 bp, Homo sapiens
tccggctggggctccgaga

SEQ ID NO: 26691 - DNA, 19 bp, Homo sapiens
tgccggctggggctccgag

SEQ ID NO: 26692 - DNA, 19 bp, Homo sapiens
tagccggctggggctccga

SEQ ID NO: 26693 - DNA, 19 bp, Homo sapiens
tgagccggctggggctccg

SEQ ID NO: 26694 - DNA, 19 bp, Homo sapiens
tggagccggctggggctcc

SEQ ID NO: 26695 - DNA, 19 bp, Homo sapiens
tcggagccggctggggctc

SEQ ID NO: 26696 - DNA, 19 bp, Homo sapiens
tgcggagccggctggggct

SEQ ID NO: 26697 - DNA, 19 bp, Homo sapiens
tggcggagccggctggggc

SEQ ID NO: 26698 - DNA, 19 bp, Homo sapiens
tgggcggagccggctgggg

SEQ ID NO: 26699 - DNA, 19 bp, Homo sapiens
tcgggcggagccggctggg

SEQ ID NO: 26700 - DNA, 19 bp, Homo sapiens
tgcgggcggagccggctgg

SEQ ID NO: 26701 - DNA, 19 bp, Homo sapiens
tagcgggcggagccggctg

SEQ ID NO: 26702 - DNA, 19 bp, Homo sapiens
taagcgggcggagccggct

SEQ ID NO: 26703 - DNA, 19 bp, Homo sapiens
tgaagcgggcggagccggc

SEQ ID NO: 26704 - DNA, 19 bp, Homo sapiens
tcgaagcgggcggagccgg

SEQ ID NO: 26705 - DNA, 19 bp, Homo sapiens
tccgaagcgggcggagccg

SEQ ID NO: 26706 - DNA, 19 bp, Homo sapiens
tgccgaagcgggcggagcc

SEQ ID NO: 26707 - DNA, 19 bp, Homo sapiens
tcgccgaagcgggcggagc

SEQ ID NO: 26708 - DNA, 19 bp, Homo sapiens
tccgccgaagcgggcggag

SEQ ID NO: 26709 - DNA, 19 bp, Homo sapiens
taccgccgaagcgggcgga

SEQ ID NO: 26710 - DNA, 19 bp, Homo sapiens
taaccgccgaagcgggcgg

SEQ ID NO: 26711 - DNA, 19 bp, Homo sapiens
taaaccgccgaagcgggcg

SEQ ID NO: 26712 - DNA, 19 bp, Homo sapiens
tcaaaccgccgaagcgggc

SEQ ID NO: 26713 - DNA, 19 bp, Homo sapiens
ttccaaaccgccgaagcgg

SEQ ID NO: 26714 - DNA, 19 bp, Homo sapiens
ttatccaaaccgccgaagc

SEQ ID NO: 26715 - DNA, 19 bp, Homo sapiens
tatatccaaaccgccgaag

SEQ ID NO: 26716 - DNA, 19 bp, Homo sapiens
taatatccaaaccgccgaa

SEQ ID NO: 26717 - DNA, 19 bp, Homo sapiens
ttaaatatccaaaccgccg

SEQ ID NO: 26718 - DNA, 19 bp, Homo sapiens
tataaatatccaaaccgcc

SEQ ID NO: 26719 - DNA, 19 bp, Homo sapiens
taataaatatccaaaccgc

SEQ ID NO: 26720 - DNA, 19 bp, Homo sapiens
ttcaataaatatccaaacc

SEQ ID NO: 26721 - DNA, 19 bp, Homo sapiens
tgtcaataaatatccaaac

SEQ ID NO: 26722 - DNA, 19 bp, Homo sapiens
tggtcaataaatatccaaa

SEQ ID NO: 26723 - DNA, 19 bp, Homo sapiens
taggtcaataaatatccaa

SEQ ID NO: 26724 - DNA, 19 bp, Homo sapiens
tgaggtcaataaatatcca

SEQ ID NO: 26725 - DNA, 19 bp, Homo sapiens
tcgaggtcaataaatatcc

SEQ ID NO: 26726 - DNA, 19 bp, Homo sapiens
tacgaggtcaataaatatc

SEQ ID NO: 26727 - DNA, 19 bp, Homo sapiens
tgacgaggtcaataaatat

SEQ ID NO: 26728 - DNA, 19 bp, Homo sapiens
tggacgaggtcaataaata

SEQ ID NO: 26729 - DNA, 19 bp, Homo sapiens
taggacgaggtcaataaat

SEQ ID NO: 26730 - DNA, 19 bp, Homo sapiens
tgaggacgaggtcaataaa

SEQ ID NO: 26731 - DNA, 19 bp, Homo sapiens
tggaggacgaggtcaataa

SEQ ID NO: 26732 - DNA, 19 bp, Homo sapiens
ttcggaggacgaggtcaat

SEQ ID NO: 26733 - DNA, 19 bp, Homo sapiens
tgtcggaggacgaggtcaa

SEQ ID NO: 26734 - DNA, 19 bp, Homo sapiens
tagtcggaggacgaggtca

SEQ ID NO: 26735 - DNA, 19 bp, Homo sapiens
tgagtcggaggacgaggtc

SEQ ID NO: 26736 - DNA, 19 bp, Homo sapiens
tcgagtcggaggacgaggt

SEQ ID NO: 26737 - DNA, 19 bp, Homo sapiens
tgcgagtcggaggacgagg

SEQ ID NO: 26738 - DNA, 19 bp, Homo sapiens
tagcgagtcggaggacgag

SEQ ID NO: 26739 - DNA, 19 bp, Homo sapiens
ttcagcgagtcggaggacg

SEQ ID NO: 26740 - DNA, 19 bp, Homo sapiens
ttgtcagcgagtcggagga

SEQ ID NO: 26741 - DNA, 19 bp, Homo sapiens
tctgtcagcgagtcggagg

SEQ ID NO: 26742 - DNA, 19 bp, Homo sapiens
tcctgtcagcgagtcggag

SEQ ID NO: 26743 - DNA, 19 bp, Homo sapiens
tgcctgtcagcgagtcgga

SEQ ID NO: 26744 - DNA, 19 bp, Homo sapiens
ttagcctgtcagcgagtcg

SEQ ID NO: 26745 - DNA, 19 bp, Homo sapiens
ttgtagcctgtcagcgagt

SEQ ID NO: 26746 - DNA, 19 bp, Homo sapiens
tctgtagcctgtcagcgag

SEQ ID NO: 26747 - DNA, 19 bp, Homo sapiens
ttcctgtagcctgtcagcg

SEQ ID NO: 26748 - DNA, 19 bp, Homo sapiens
tgtcctgtagcctgtcagc

SEQ ID NO: 26749 - DNA, 19 bp, Homo sapiens
tggtcctgtagcctgtcag

SEQ ID NO: 26750 - DNA, 19 bp, Homo sapiens
tgggtcctgtagcctgtca

SEQ ID NO: 26751 - DNA, 19 bp, Homo sapiens
tggggtcctgtagcctgtc

SEQ ID NO: 26752 - DNA, 19 bp, Homo sapiens
tttgggggtcctgtagcct

SEQ ID NO: 26753 - DNA, 19 bp, Homo sapiens
tttgttgggggtcctgtag

SEQ ID NO: 26754 - DNA, 19 bp, Homo sapiens
tgttgttgggggtcctgta

SEQ ID NO: 26755 - DNA, 19 bp, Homo sapiens
tggttgttgggggtcctgt

SEQ ID NO: 26756 - DNA, 19 bp, Homo sapiens
tgggttgttgggggtcctg

SEQ ID NO: 26757 - DNA, 19 bp, Homo sapiens
tttggggttgttgggggtc

SEQ ID NO: 26758 - DNA, 19 bp, Homo sapiens
tattggggttgttgggggt

SEQ ID NO: 26759 - DNA, 19 bp, Homo sapiens
tgattggggttgttggggg

SEQ ID NO: 26760 - DNA, 19 bp, Homo sapiens
ttggattggggttgttggg

SEQ ID NO: 26761 - DNA, 19 bp, Homo sapiens
tgtggattggggttgttgg

SEQ ID NO: 26762 - DNA, 19 bp, Homo sapiens
tcgtggattggggttgttg

SEQ ID NO: 26763 - DNA, 19 bp, Homo sapiens
tacgtggattggggttgtt

SEQ ID NO: 26764 - DNA, 19 bp, Homo sapiens
taacgtggattggggttgt

SEQ ID NO: 26765 - DNA, 19 bp, Homo sapiens
taaacgtggattggggttg

SEQ ID NO: 26766 - DNA, 19 bp, Homo sapiens
taaaacgtggattggggtt

SEQ ID NO: 26767 - DNA, 19 bp, Homo sapiens
tcaaaacgtggattggggt

SEQ ID NO: 26768 - DNA, 19 bp, Homo sapiens
ttccaaaacgtggattggg

SEQ ID NO: 26769 - DNA, 19 bp, Homo sapiens
tatccaaaacgtggattgg

SEQ ID NO: 26770 - DNA, 19 bp, Homo sapiens
tcatccaaaacgtggattg

SEQ ID NO: 26771 - DNA, 19 bp, Homo sapiens
ttgcatccaaaacgtggat

SEQ ID NO: 26772 - DNA, 19 bp, Homo sapiens
tgtgcatccaaaacgtgga

SEQ ID NO: 26773 - DNA, 19 bp, Homo sapiens
tagtgcatccaaaacgtgg

SEQ ID NO: 26774 - DNA, 19 bp, Homo sapiens
ttcagtgcatccaaaacgt

SEQ ID NO: 26775 - DNA, 19 bp, Homo sapiens
ttctcagtgcatccaaaac

SEQ ID NO: 26776 - DNA, 19 bp, Homo sapiens
tgtctcagtgcatccaaaa

SEQ ID NO: 26777 - DNA, 19 bp, Homo sapiens
tggtctcagtgcatccaaa

SEQ ID NO: 26778 - DNA, 19 bp, Homo sapiens
tgggtctcagtgcatccaa

SEQ ID NO: 26779 - DNA, 19 bp, Homo sapiens
tggggtctcagtgcatcca

SEQ ID NO: 26780 - DNA, 19 bp, Homo sapiens
ttcggggtctcagtgcatc

SEQ ID NO: 26781 - DNA, 19 bp, Homo sapiens
ttgtcggggtctcagtgca

SEQ ID NO: 26782 - DNA, 19 bp, Homo sapiens
tatgtcggggtctcagtgc

SEQ ID NO: 26783 - DNA, 19 bp, Homo sapiens
taatgtcggggtctcagtg

SEQ ID NO: 26784 - DNA, 19 bp, Homo sapiens
tgaatgtcggggtctcagt

SEQ ID NO: 26785 - DNA, 19 bp, Homo sapiens
tggaatgtcggggtctcag

SEQ ID NO: 26786 - DNA, 19 bp, Homo sapiens
taggaatgtcggggtctca

SEQ ID NO: 26787 - DNA, 19 bp, Homo sapiens
tgaggaatgtcggggtctc

SEQ ID NO: 26788 - DNA, 19 bp, Homo sapiens
tcgaggaatgtcggggtct

SEQ ID NO: 26789 - DNA, 19 bp, Homo sapiens
tccgaggaatgtcggggtc

SEQ ID NO: 26790 - DNA, 19 bp, Homo sapiens
ttaccgaggaatgtcgggg

SEQ ID NO: 26791 - DNA, 19 bp, Homo sapiens
tataccgaggaatgtcggg

SEQ ID NO: 26792 - DNA, 19 bp, Homo sapiens
taataccgaggaatgtcgg

SEQ ID NO: 26793 - DNA, 19 bp, Homo sapiens
ttaaataccgaggaatgtc

SEQ ID NO: 26794 - DNA, 19 bp, Homo sapiens
tataaataccgaggaatgt

SEQ ID NO: 26795 - DNA, 19 bp, Homo sapiens
taataaataccgaggaatg

SEQ ID NO: 26796 - DNA, 19 bp, Homo sapiens
tcaataaataccgaggaat

SEQ ID NO: 26797 - DNA, 19 bp, Homo sapiens
tacaataaataccgaggaa

SEQ ID NO: 26798 - DNA, 19 bp, Homo sapiens
tgacaataaataccgagga

SEQ ID NO: 26799 - DNA, 19 bp, Homo sapiens
tagacaataaataccgagg

SEQ ID NO: 26800 - DNA, 19 bp, Homo sapiens
tcagacaataaataccgag

SEQ ID NO: 26801 - DNA, 19 bp, Homo sapiens
tacagacaataaataccga

SEQ ID NO: 26802 - DNA, 19 bp, Homo sapiens
tgacagacaataaataccg

SEQ ID NO: 26803 - DNA, 19 bp, Homo sapiens
tggacagacaataaatacc

SEQ ID NO: 26804 - DNA, 19 bp, Homo sapiens
tgggacagacaataaatac

SEQ ID NO: 26805 - DNA, 19 bp, Homo sapiens
ttggggacagacaataaat

SEQ ID NO: 26806 - DNA, 19 bp, Homo sapiens
tgtggggacagacaataaa

SEQ ID NO: 26807 - DNA, 19 bp, Homo sapiens
tggtggggacagacaataa

SEQ ID NO: 26808 - DNA, 19 bp, Homo sapiens
ttaggtggggacagacaat

SEQ ID NO: 26809 - DNA, 19 bp, Homo sapiens
tctaggtggggacagacaa

SEQ ID NO: 26810 - DNA, 19 bp, Homo sapiens
ttcctaggtggggacagac

SEQ ID NO: 26811 - DNA, 19 bp, Homo sapiens
tgtcctaggtggggacaga

SEQ ID NO: 26812 - DNA, 19 bp, Homo sapiens
tggtcctaggtggggacag

SEQ ID NO: 26813 - DNA, 19 bp, Homo sapiens
tgggtcctaggtggggaca

SEQ ID NO: 26814 - DNA, 19 bp, Homo sapiens
tggggtcctaggtggggac

SEQ ID NO: 26815 - DNA, 19 bp, Homo sapiens
ttgggggtcctaggtgggg

SEQ ID NO: 26816 - DNA, 19 bp, Homo sapiens
tgtgggggtcctaggtggg

SEQ ID NO: 26817 - DNA, 19 bp, Homo sapiens
tggtgggggtcctaggtgg

SEQ ID NO: 26818 - DNA, 19 bp, Homo sapiens
tgggtgggggtcctaggtg

SEQ ID NO: 26819 - DNA, 19 bp, Homo sapiens
tggggtgggggtcctaggt

SEQ ID NO: 26820 - DNA, 19 bp, Homo sapiens
tgggggtgggggtcctagg

SEQ ID NO: 26821 - DNA, 19 bp, Homo sapiens
ttcgggggtgggggtccta

SEQ ID NO: 26822 - DNA, 19 bp, Homo sapiens
tgtcgggggtgggggtcct

SEQ ID NO: 26823 - DNA, 19 bp, Homo sapiens
tggtcgggggtgggggtcc

SEQ ID NO: 26824 - DNA, 19 bp, Homo sapiens
tgggtcgggggtgggggtc

SEQ ID NO: 26825 - DNA, 19 bp, Homo sapiens
tagggtcgggggtgggggt

SEQ ID NO: 26826 - DNA, 19 bp, Homo sapiens
tgagggtcgggggtggggg

SEQ ID NO: 26827 - DNA, 19 bp, Homo sapiens
tcgagggtcgggggtgggg

SEQ ID NO: 26828 - DNA, 19 bp, Homo sapiens
tgcgagggtcgggggtggg

SEQ ID NO: 26829 - DNA, 19 bp, Homo sapiens
tttcgcgagggtcgggggt

SEQ ID NO: 26830 - DNA, 19 bp, Homo sapiens
tttttattcgcgagggtcg

SEQ ID NO: 26831 - DNA, 19 bp, Homo sapiens
tcttttattcgcgagggtc

SEQ ID NO: 26832 - DNA, 19 bp, Homo sapiens
tccttttattcgcgagggt

SEQ ID NO: 26833 - DNA, 19 bp, Homo sapiens
tgccttttattcgcgaggg

SEQ ID NO: 26834 - DNA, 19 bp, Homo sapiens
tggccttttattcgcgagg

SEQ ID NO: 26835 - DNA, 19 bp, Homo sapiens
tgggccttttattcgcgag

SEQ ID NO: 26836 - DNA, 19 bp, Homo sapiens
tagggccttttattcgcga

SEQ ID NO: 26837 - DNA, 19 bp, Homo sapiens
tgagggccttttattcgcg

SEQ ID NO: 26838 - DNA, 19 bp, Homo sapiens
ttggagggccttttattcg

SEQ ID NO: 26839 - DNA, 19 bp, Homo sapiens
tatggagggccttttattc

SEQ ID NO: 26840 - DNA, 19 bp, Homo sapiens
tgatggagggccttttatt

SEQ ID NO: 26841 - DNA, 19 bp, Homo sapiens
tagatggagggccttttat

SEQ ID NO: 26842 - DNA, 19 bp, Homo sapiens
tcagatggagggcctttta

SEQ ID NO: 26843 - DNA, 19 bp, Homo sapiens
tgcagatggagggcctttt

SEQ ID NO: 26844 - DNA, 19 bp, Homo sapiens
tggcagatggagggccttt

SEQ ID NO: 26845 - DNA, 19 bp, Homo sapiens
ttttgggcagatggagggc

SEQ ID NO: 26846 - DNA, 19 bp, Homo sapiens
tctttgggcagatggaggg

SEQ ID NO: 26847 - DNA, 19 bp, Homo sapiens
tgctttgggcagatggagg

SEQ ID NO: 26848 - DNA, 19 bp, Homo sapiens
tagctttgggcagatggag

SEQ ID NO: 26849 - DNA, 19 bp, Homo sapiens
tgagctttgggcagatgga

SEQ ID NO: 26850 - DNA, 19 bp, Homo sapiens
tagagctttgggcagatgg

SEQ ID NO: 26851 - DNA, 19 bp, Homo sapiens
tcagagctttgggcagatg

SEQ ID NO: 26852 - DNA, 17 bp, Homo sapiens
tcaagcttttcttttag

SEQ ID NO: 26853 - DNA, 31 bp, Homo sapiens
aactgcaagatgccagcagatcagctcaggc

SEQ ID NO: 26854 - DNA, 22 bp, Homo sapiens
gagcagatgacaactactgctg

SEQ ID NO: 26855 - DNA, 29 bp, Homo sapiens
gacccatgttcctggatgcagactttgtg

SEQ ID NO: 26856 - DNA, 22 bp, Homo sapiens
gcagagactcggggaattgcag

SEQ ID NO: 26857 - DNA, 23 bp, Homo sapiens
gatcatcaagcagaaggtatgag

SEQ ID NO: 26858 - DNA, 30 bp, Homo sapiens; identical to SEQ ID NO: 10596

SEQ ID NO: 26859 - DNA, 24 bp, Homo sapiens
ttacagatgttgataccacctatc

SEQ ID NO: 26860 - DNA, 21 bp, Homo sapiens
cagatgttgataccacctatc

SEQ ID NO: 26861 - DNA, 25 bp, Homo sapiens
cttacagatgttgataccacctatc

SEQ ID NO: 26862 - DNA, 20 bp, Homo sapiens
ttacagatgttgataccacc

SEQ ID NO: 26863 - DNA, 20 bp, Homo sapiens
gtgcttacagatgttgatac

SEQ ID NO: 26864 - DNA, 23 bp, Homo sapiens
ccacacaacgactggaacatgca

SEQ ID NO: 26865 - DNA, 25 bp, Homo sapiens
ccagacctatttgactggaatagtg

SEQ ID NO: 26866 - DNA, 25 bp, Homo sapiens
tactcgatcctgaaggttggtaaat

SEQ ID NO: 26867 - DNA, 21 bp, Homo sapiens
tatgtgtatgtgttttaggcc

SEQ ID NO: 26868 - DNA, 24 bp, Homo sapiens
ataggtaagaagattactgagaca

SEQ ID NO: 26869 - DNA, 24 bp, Homo sapiens
tctcatccatagtcataggtaaga

SEQ ID NO: 26870 - DNA, 20 bp, Homo sapiens
ggatccacaagagttcatgc

SEQ ID NO: 26871 - DNA, 20 bp, Homo sapiens
taatgtaagtagtaccctgg

SEQ ID NO: 26872 - DNA, 30 bp, Homo sapiens
aaggatccacaagagttcatgccctgaaca

SEQ ID NO: 26873 - DNA, 31 bp, Homo sapiens
cagtgacctacaggatgggaggcgcctccta

SEQ ID NO: 26874 - DNA, 31 bp, Homo sapiens
acctacaggatgggaggcgcctcctagacct

SEQ ID NO: 26875 - DNA, 25 bp, Homo sapiens
cagtgacctacaggatgggaggcgc

SEQ ID NO: 26876 - DNA, 26 bp, Homo sapiens
gaggcgcctcctagacctcctcgaag

SEQ ID NO: 26877 - DNA, 21 bp, Homo sapiens
cagtgacctacaggatgggag

SEQ ID NO: 26878 - DNA, 22 bp, Homo sapiens
cctgacagggcaaaaactggta

SEQ ID NO: 26879 - DNA, 26 bp, Homo sapiens
tttcagtttgggaagcagcatattga

SEQ ID NO: 26880 - DNA, 25 bp, Homo sapiens
ctacaggatgggaggcgcctcctag

SEQ ID NO: 26881 - DNA, 31 bp, Homo sapiens
gaagtactgacatcgtagatggaaatcataa

SEQ ID NO: 26882 - DNA, 31 bp, Homo sapiens
tttggaatataatcctccactggcaggtaag

SEQ ID NO: 26883 - DNA, 25 bp, Homo sapiens
ccactggcaggtaagaatcctgatg

SEQ ID NO: 26884 - DNA, 25 bp, Homo sapiens
gtgaatattggaagtactgacatcg

SEQ ID NO: 26885 - DNA, 18 bp, Homo sapiens
agaatcctgatgaatggt

SEQ ID NO: 26886 - DNA, 18 bp, Homo sapiens
aatcctccactggcaggt

SEQ ID NO: 26887 - DNA, 27 bp, Homo sapiens
ttaacaggttgatttagtgaatattgg

SEQ ID NO: 26888 - DNA, 30 bp, Homo sapiens
ataatcctccactggcaggtaacaatcctg

SEQ ID NO: 26889 - DNA, 31 bp, Homo sapiens
atttagtgaatattggaagtactgacatcgt

SEQ ID NO: 26890 - DNA, 31 bp, Homo sapiens
tattggaagtactgacatcgtagatggaaat

SEQ ID NO: 26891 - DNA, 21 bp, Homo sapiens
tgcagcatttggaagctcctg

SEQ ID NO: 26892 - DNA, 29 bp, Homo sapiens
tgcagcatttggaagctcctgaagacaag

SEQ ID NO: 26893 - DNA, 22 bp, Homo sapiens
cgtggcttctttctgctgagga

SEQ ID NO: 26894 - DNA, 20 bp, Homo sapiens
gcacaaggagagatttctaa

SEQ ID NO: 26895 - DNA, 20 bp, Homo sapiens
attgtgtaacacccaattta

SEQ ID NO: 26896 - DNA, 24 bp, Homo sapiens
attcaagatgggaatgcctcaggg

SEQ ID NO: 26897 - DNA, 20 bp, Homo sapiens
aaacaaagcaagtaagtcct

SEQ ID NO: 26898 - DNA, 23 bp, Homo sapiens
cagatgaatctcctaaattcaag

SEQ ID NO: 26899 - DNA, 23 bp, Homo sapiens
aacaggaaaattatcagaagatg

SEQ ID NO: 26900 - DNA, 24 bp, Homo sapiens
tgactggctaacaaaaacagaaga

SEQ ID NO: 26901 - DNA, 20 bp, Homo sapiens
aaattttcagtttacataga

SEQ ID NO: 26902 - DNA, 20 bp, Homo sapiens
gttttaatggatctccagaa

SEQ ID NO: 26903 - DNA, 24 bp, Homo sapiens
ctagtggagatcacgcaactgctg

SEQ ID NO: 26904 - DNA, 21 bp, Homo sapiens
atggtggtggtagttgatgaa

SEQ ID NO: 26905 - DNA, 25 bp, Homo sapiens
cttaaggtcagattattttgcttag

SEQ ID NO: 26906 - DNA, 28 bp, Homo sapiens
acagaagaccgctgggttcttttacaag

SEQ ID NO: 26907 - DNA, 22 bp, Homo sapiens
gatgggcaaacatctgtagatg

SEQ ID NO: 26908 - DNA, 23 bp, Homo sapiens
ggttcttttacaagacatccttc

SEQ ID NO: 26909 - DNA, 20 bp, Homo sapiens
cgtcttactgaagaacaggt

SEQ ID NO: 26910 - DNA, 24 bp, Homo sapiens
ttactgaagaacaggtgtgtcatg

SEQ ID NO: 26911 - DNA, 20 bp, Homo sapiens
caagacatccttctcaaatg

SEQ ID NO: 26912 - DNA, 24 bp, Homo sapiens
tctcttctccaggtattgggagat

SEQ ID NO: 26913 - DNA, 31 bp, Homo sapiens
aatgtcttgcagtgcctttttagtgcatggc

SEQ ID NO: 26914 - DNA, 24 bp, Homo sapiens
gattcacacaactggctttaaaga

SEQ ID NO: 26915 - DNA, 21 bp, Homo sapiens
ttagtgcatggctttcagaaa

SEQ ID NO: 26916 - DNA, 25 bp, Homo sapiens
gtcttcaaaaactggccgtatgtac

SEQ ID NO: 26917 - DNA, 31 bp, Homo sapiens
ttgttttaacaggttttaaaagcggatctag

SEQ ID NO: 26918 - DNA, 31 bp, Homo sapiens
taacaggttttaaaagcggatctagaaaaga

SEQ ID NO: 26919 - DNA, 25 bp, Homo sapiens
taacaggttttaaaagcggatctag

SEQ ID NO: 26920 - DNA, 23 bp, Homo sapiens
taagtcagtgacccagaagacgg

SEQ ID NO: 26921 - DNA, 26 bp, Homo sapiens
ttaacaggttttaaaagcggatctag

SEQ ID NO: 26922 - DNA, 20 bp, Homo sapiens
ttaacaggttttaaaagcgg

SEQ ID NO: 26923 - DNA, 26 bp, Homo sapiens
ggatctagaaaagaaaaagcaatcca

SEQ ID NO: 26924 - DNA, 25 bp, Homo sapiens
cagtgacccagaagacggaagcatg

SEQ ID NO: 26925 - DNA, 23 bp, Homo sapiens
actgtattcactcaaacaagatc

SEQ ID NO: 26926 - DNA, 22 bp, Homo sapiens
gacggaagcatggctggataac

SEQ ID NO: 26927 - DNA, 25 bp, Homo sapiens
cacaggttagtgataccaattatca

SEQ ID NO: 26928 - DNA, 22 bp, Homo sapiens
gtacagcacaggttagtgatac

SEQ ID NO: 26929 - DNA, 19 bp, Homo sapiens
aactgcaagatgccagcag

SEQ ID NO: 26930 - DNA, 28 bp, Homo sapiens
gaacagccggtggatcgaattctgccag

SEQ ID NO: 26931 - DNA, 19 bp, Homo sapiens
ccaacccaccaccccatca

SEQ ID NO: 26932 - DNA, 25 bp, Homo sapiens
ctttctagagggtgttaatgcagat

SEQ ID NO: 26933 - DNA, 24 bp, Homo sapiens
gcctcagaacaactgaacagccgg

SEQ ID NO: 26934 - DNA, 28 bp, Homo sapiens
tttctttctagagggtgttaatgcagat

SEQ ID NO: 26935 - DNA, 28 bp, Homo sapiens
tttgtaaggtaagaatctcttctccttc

SEQ ID NO: 26936 - DNA, 20 bp, Homo sapiens
gaacagccggtggatcgaat

SEQ ID NO: 26937 - DNA, 20 bp, Homo sapiens
gcagatgacaactactgctg

SEQ ID NO: 26938 - DNA, 22 bp, Homo sapiens
gcacaggatgaagtcaaccggc

SEQ ID NO: 26939 - DNA, 22 bp, Homo sapiens
ggacccatgttcctggatgcag

SEQ ID NO: 26940 - DNA, 23 bp, Homo sapiens
gacccatgttcctggatgcagac

SEQ ID NO: 26941 - DNA, 24 bp, Homo sapiens
tcaaccggctatcagatcttcaac

SEQ ID NO: 26942 - DNA, 24 bp, Homo sapiens
tgcgctatcaggagaccatgagtg

SEQ ID NO: 26943 - DNA, 23 bp, Homo sapiens
catcaggacatgggtccagcagt

SEQ ID NO: 26944 - DNA, 21 bp, Homo sapiens
actctccatacctcaacttag

SEQ ID NO: 26945 - DNA, 23 bp, Homo sapiens
ggggaattgcaggtctgtgaata

SEQ ID NO: 26946 - DNA, 26 bp, Homo sapiens
ggcctatactatctcagcaccactgt

SEQ ID NO: 26947 - DNA, 22 bp, Homo sapiens
gcaagagcaacaaagtggccta

SEQ ID NO: 26948 - DNA, 19 bp, Homo sapiens
gaagaaagcgccctctgaa

SEQ ID NO: 26949 - DNA, 23 bp, Homo sapiens
tctgaaggaggaatggcctgccc

SEQ ID NO: 26950 - DNA, 24 bp, Homo sapiens
agaatcacatacaaaccctgaaga

SEQ ID NO: 26951 - DNA, 27 bp, Homo sapiens
cagtgatattcagacaattcagcccag

SEQ ID NO: 26952 - DNA, 26 bp, Homo sapiens
ctcagtgggatcacatgtgccaacag

SEQ ID NO: 26953 - DNA, 24 bp, Homo sapiens
tcacatgtgccaacaggtatagac

SEQ ID NO: 26954 - DNA, 25 bp, Homo sapiens
aactccagatgaattacagaaagca

SEQ ID NO: 26955 - DNA, 26 bp, Homo sapiens
gtggaaggtctatgccagaaaggagg

SEQ ID NO: 26956 - DNA, 25 bp, Homo sapiens
cagagatgcacgaatggatgacaca

SEQ ID NO: 26957 - DNA, 25 bp, Homo sapiens
ccacctgtagcacaagaggccttaa

SEQ ID NO: 26958 - DNA, 22 bp, Homo sapiens
gaaatgcaagactttggaagtc

SEQ ID NO: 26959 - DNA, 24 bp, Homo sapiens
cttaggaagtttgggcatgttggc

SEQ ID NO: 26960 - DNA, 26 bp, Homo sapiens
tcctggcggagctgaggaaatctctg

SEQ ID NO: 26961 - DNA, 21 bp, Homo sapiens
ctctgaggtgctagatgtaag

SEQ ID NO: 26962 - DNA, 25 bp, Homo sapiens
ggcacagaccctaacagatggcgga

SEQ ID NO: 26963 - DNA, 25 bp, Homo sapiens
gcgacattcagaggataacccaaat

SEQ ID NO: 26964 - DNA, 22 bp, Homo sapiens
gggaactacatgaagaggtatg

SEQ ID NO: 26965 - DNA, 26 bp, Homo sapiens
cagacaaggtggacgcagctcaaatg

SEQ ID NO: 26966 - DNA, 26 bp, Homo sapiens
gaacagagcatccagtctgcccagga

SEQ ID NO: 26967 - DNA, 23 bp, Homo sapiens
aatgcctcaggaagcccaggcaa

SEQ ID NO: 26968 - DNA, 24 bp, Homo sapiens
gcacaggtatatgttatttcagaa

SEQ ID NO: 26969 - DNA, 25 bp, Homo sapiens
caggtatatgttatttcagaaacta

SEQ ID NO: 26970 - DNA, 21 bp, Homo sapiens
tccaatctgatttgacaagtc

SEQ ID NO: 26971 - DNA, 24 bp, Homo sapiens
acaggtatatgttatttcagaaac

SEQ ID NO: 26972 - DNA, 20 bp, Homo sapiens
tgtggtatgtatttctggtg

SEQ ID NO: 26973 - DNA, 20 bp, Homo sapiens
cagtcacagctaaatcattg

SEQ ID NO: 26974 - DNA, 23 bp, Homo sapiens
caagatgtctccatgaagtttcg

SEQ ID NO: 26975 - DNA, 25 bp, Homo sapiens
gccaattttgagcagcgtctacaag

SEQ ID NO: 26976 - DNA, 20 bp, Homo sapiens
ggagcaaaggtgtgtgcatg

SEQ ID NO: 26977 - DNA, 24 bp, Homo sapiens
agactggacgtcagattgtacaga

SEQ ID NO: 26978 - DNA, 27 bp, Homo sapiens
gtctgaagtggaaatggtgataaagac

SEQ ID NO: 26979 - DNA, 25 bp, Homo sapiens
cagattgtacagaaaaagcagacgg

SEQ ID NO: 26980 - DNA, 22 bp, Homo sapiens
ggctggcagctacagatatgga

SEQ ID NO: 26981 - DNA, 23 bp, Homo sapiens
atttggattctgaagttgcctgg

SEQ ID NO: 26982 - DNA, 30 bp, Homo sapiens
ttcattataattcttttcaggtaacagaaa

SEQ ID NO: 26983 - DNA, 25 bp, Homo sapiens
cgtaagatgcgaaaggaaatgaatg

SEQ ID NO: 26984 - DNA, 26 bp, Homo sapiens
cagatatggaattgacaaagagatca

SEQ ID NO: 26985 - DNA, 30 bp, Homo sapiens
ctggggaaaggtaaaacctatatcactgaa

SEQ ID NO: 26986 - DNA, 26 bp, Homo sapiens
cttgacagaatggctggcagctacag

SEQ ID NO: 26987 - DNA, 21 bp, Homo sapiens
tgtcacctcccgagcagaaga

SEQ ID NO: 26988 - DNA, 20 bp, Homo sapiens
gtcttctgaatagtaactgg

SEQ ID NO: 26989 - DNA, 20 bp, Homo sapiens
acagaaggtgcacctgaaga

SEQ ID NO: 26990 - DNA, 25 bp, Homo sapiens
tgaccagaatgtggaccacatcaca

SEQ ID NO: 26991 - DNA, 20 bp, Homo sapiens
ggaataccagaaacacatgg

SEQ ID NO: 26992 - DNA, 25 bp, Homo sapiens
tacgcccaaaggtggactctacacg

SEQ ID NO: 26993 - DNA, 24 bp, Homo sapiens
ggtgaccactgcaggaaattagta

SEQ ID NO: 26994 - DNA, 24 bp, Homo sapiens
gatttgcagccatttcacacagaa

SEQ ID NO: 26995 - DNA, 20 bp, Homo sapiens
ggcctccattcctttgaagg

SEQ ID NO: 26996 - DNA, 25 bp, Homo sapiens
aaccactggaggctgaaattcagca

SEQ ID NO: 26997 - DNA, 25 bp, Homo sapiens
gtgaatctgaaagaggaagacttca

SEQ ID NO: 26998 - DNA, 20 bp, Homo sapiens
aagaggagacaacttacaac

SEQ ID NO: 26999 - DNA, 20 bp, Homo sapiens
acagcagctgttacagacaa

SEQ ID NO: 27000 - DNA, 20 bp, Homo sapiens
tgctctcaaggtattagagc

SEQ ID NO: 27001 - DNA, 22 bp, Homo sapiens
aacaggatttgaggtctcaaag

SEQ ID NO: 27002 - DNA, 25 bp, Homo sapiens
gcccagagatgaaaggaaaataaag

SEQ ID NO: 27003 - DNA, 27 bp, Homo sapiens
ccagcacactgtccgtgaagaaacgat

SEQ ID NO: 27004 - DNA, 24 bp, Homo sapiens
aaatcactcatgtctcacaagccc

SEQ ID NO: 27005 - DNA, 25 bp, Homo sapiens
gaccgacaagggtaggtaacacata

SEQ ID NO: 27006 - DNA, 20 bp, Homo sapiens
agctacaggaagctctctcc

SEQ ID NO: 27007 - DNA, 23 bp, Homo sapiens
tgcaacgcctgtggaaagggtga

SEQ ID NO: 27008 - DNA, 20 bp, Homo sapiens
gtttctcagaaagacacaaa

SEQ ID NO: 27009 - DNA, 20 bp, Homo sapiens
gtatcttaaggtaagtcttt

SEQ ID NO: 27010 - DNA, 20 bp, Homo sapiens
ctgcaggcgatttgacagat

SEQ ID NO: 27011 - DNA, 20 bp, Homo sapiens
gcttgagcaagtcaaggtaa

SEQ ID NO: 27012 - DNA, 20 bp, Homo sapiens
gtatcccacttgaacctgga

SEQ ID NO: 27013 - DNA, 25 bp, Homo sapiens
agtgctcccataagcccagaagagc

SEQ ID NO: 27014 - DNA, 27 bp, Homo sapiens
gcagacaaatctccagtggataaaggt

SEQ ID NO: 27015 - DNA, 21 bp, Homo sapiens
ctgtttcagttactggtggaa

SEQ ID NO: 27016 - DNA, 29 bp, Homo sapiens
ggaagttagaagatctgagctctgagtgg

SEQ ID NO: 27017 - DNA, 27 bp, Homo sapiens
ttagaagatctgagctctgagtggaag

SEQ ID NO: 27018 - DNA, 25 bp, Homo sapiens
ggagcctgtaagtatactggatccc

SEQ ID NO: 27019 - DNA, 26 bp, Homo sapiens
gctcctactcagactgttactctggt

SEQ ID NO: 27020 - DNA, 24 bp, Homo sapiens
gatttcaaccgggcttggacagaa

SEQ ID NO: 27021 - DNA, 30 bp, Homo sapiens; identical to SEQ ID NO: 11572

SEQ ID NO: 27022 - DNA, 25 bp, Homo sapiens
ctagaaatgccatcttccttgatgt

SEQ ID NO: 27023 - DNA, 30 bp, Homo sapiens; identical to SEQ ID NO: 7990

SEQ ID NO: 27024 - DNA, 25 bp, Homo sapiens
agcagaaggtatgagaaaaaatgat

SEQ ID NO: 27025 - DNA, 21 bp, Homo sapiens
cacagagggtgatggtgggtg

SEQ ID NO: 27026 - DNA, 22 bp, Homo sapiens
ttgaggatatcaacgagatgat

SEQ ID NO: 27027 - DNA, 21 bp, Homo sapiens
cttacaggcaacaatgcagga

SEQ ID NO: 27028 - DNA, 21 bp, Homo sapiens
tggaacagaggcgtccccagt

SEQ ID NO: 27029 - DNA, 20 bp, Homo sapiens
ggctagaacaatcattacgg

SEQ ID NO: 27030 - DNA, 20 bp, Homo sapiens
tcgaagtaagttttttaaca

SEQ ID NO: 27031 - DNA, 25 bp, Homo sapiens
cagaaccggaggcaacagttgaatg

SEQ ID NO: 27032 - DNA, 24 bp, Homo sapiens
caccttcagaaccggaggcaacag

SEQ ID NO: 27033 - DNA, 31 bp, Homo sapiens; identical to SEQ ID NO: 11128

SEQ ID NO: 27034 - DNA, 21 bp, Homo sapiens
tcacagaaaccaaggttagta

SEQ ID NO: 27035 - DNA, 25 bp, Homo sapiens
ggatgaagtacaagaacaccttcag

SEQ ID NO: 27036 - DNA, 27 bp, Homo sapiens
gagtcatggaaggagggtccctataca

SEQ ID NO: 27037 - DNA, 25 bp, Homo sapiens
agaaaatcacagaaaccaaggttag

SEQ ID NO: 27038 - DNA, 27 bp, Homo sapiens
gaaaccaaggttagtatcaaagatacc

SEQ ID NO: 27039 - DNA, 22 bp, Homo sapiens
cttttattctagttgaaagaat

SEQ ID NO: 27040 - DNA, 25 bp, Homo sapiens
attctagttgaaagaattcagaatc

SEQ ID NO: 27041 - DNA, 20 bp, Homo sapiens
gaattcagaatcagtgggat

SEQ ID NO: 27042 - DNA, 22 bp, Homo sapiens
tcttaggacaggccagagccaa

SEQ ID NO: 27043 - DNA, 30 bp, Homo sapiens; identical to SEQ ID NO: 10234

SEQ ID NO: 27044 - DNA, 31 bp, Homo sapiens; identical to SEQ ID NO: 9647

SEQ ID NO: 27045 - DNA, 30 bp, Homo sapiens
ctttctccaggctagaagaacaaaagaata

SEQ ID NO: 27046 - DNA, 28 bp, Homo sapiens
gaatttgttttatggttggaggaagcag

SEQ ID NO: 27047 - DNA, 26 bp, Homo sapiens
ttacaggaactccaggatggcattgg

SEQ ID NO: 27048 - DNA, 20 bp, Homo sapiens
gatgccagtattctacagga

SEQ ID NO: 27049 - DNA, 27 bp, Homo sapiens
tgaatctgcggtggcaggaggtctgca

SEQ ID NO: 27050 - DNA, 20 bp, Homo sapiens
cagacagaaaaaagaggtag

SEQ ID NO: 27051 - DNA, 20 bp, Homo sapiens
ttcagcaatcctcaaaaaca

SEQ ID NO: 27052 - DNA, 25 bp, Homo sapiens
ttgatccatatgcttttacctgcag

SEQ ID NO: 27053 - DNA, 25 bp, Homo sapiens
ccatatgcttttacctgcaggcgat

SEQ ID NO: 27054 - DNA, 25 bp, Homo sapiens
tgcttttacctgcaggcgatttgac

SEQ ID NO: 27055 - DNA, 25 bp, Homo sapiens
ttacctgcaggcgatttgacagatc

SEQ ID NO: 27056 - DNA, 25 bp, Homo sapiens
tgcaggcgatttgacagatctgttg

SEQ ID NO: 27057 - DNA, 25 bp, Homo sapiens
gcgatttgacagatctgttgagaaa

SEQ ID NO: 27058 - DNA, 25 bp, Homo sapiens
atttgacagatctgttgagaaatgg

SEQ ID NO: 27059 - DNA, 25 bp, Homo sapiens
tgagaaatggcggcgttttcattat

SEQ ID NO: 27060 - DNA, 25 bp, Homo sapiens
ttttcattatgatataaagatattt

SEQ ID NO: 27061 - DNA, 25 bp, Homo sapiens
aaagatatttaatcagtggctaaca

SEQ ID NO: 27062 - DNA, 25 bp, Homo sapiens
gtggctaacagaagctgaacagttt

SEQ ID NO: 27063 - DNA, 25 bp, Homo sapiens
tgaacagtttctcagaaagacacaa

SEQ ID NO: 27064 - DNA, 25 bp, Homo sapiens
aaagacacaaattcctgagaattgg

SEQ ID NO: 27065 - DNA, 25 bp, Homo sapiens
tgagaattgggaacatgctaaatac

SEQ ID NO: 27066 - DNA, 25 bp, Homo sapiens
tgctaaatacaaatggtatcttaag

SEQ ID NO: 27067 - DNA, 25 bp, Homo sapiens
aatacaaatggtatcttaaggtaag

SEQ ID NO: 27068 - DNA, 25 bp, Homo sapiens
aaatggtatcttaaggtaagtcttt

SEQ ID NO: 27069 - DNA, 25 bp, Homo sapiens
gtatcttaaggtaagtctttgattt

SEQ ID NO: 27070 - DNA, 25 bp, Homo sapiens
ttaaggtaagtctttgatttgtttt

SEQ ID NO: 27071 - DNA, 25 bp, Homo sapiens
gtaagtctttgatttgttttttcga

SEQ ID NO: 27072 - DNA, 25 bp, Homo sapiens
gttttgcctttttggtatcttacag

SEQ ID NO: 27073 - DNA, 25 bp, Homo sapiens
ttttgcctttttggtatcttacagg

SEQ ID NO: 27074 - DNA, 25 bp, Homo sapiens
gcctttttggtatcttacaggaact

SEQ ID NO: 27075 - DNA, 25 bp, Homo sapiens
cctttttggtatcttacaggaactc

SEQ ID NO: 27076 - DNA, 25 bp, Homo sapiens
tttggtatcttacaggaactccagg

SEQ ID NO: 27077 - DNA, 25 bp, Homo sapiens
ttggtatcttacaggaactccagga

SEQ ID NO: 27078 - DNA, 25 bp, Homo sapiens
tatcttacaggaactccaggatggc

SEQ ID NO: 27079 - DNA, 25 bp, Homo sapiens
atcttacaggaactccaggatggca

SEQ ID NO: 27080 - DNA, 25 bp, Homo sapiens
tacaggaactccaggatggcattgg

SEQ ID NO: 27081 - DNA, 25 bp, Homo sapiens
acaggaactccaggatggcattggg

SEQ ID NO: 27082 - DNA, 25 bp, Homo sapiens
gaactccaggatggcattgggcagc

SEQ ID NO: 27083 - DNA, 25 bp, Homo sapiens
aactccaggatggcattgggcagcg

SEQ ID NO: 27084 - DNA, 25 bp, Homo sapiens
tggcattgggcagcggcaaactgtt

SEQ ID NO: 27085 - DNA, 25 bp, Homo sapiens
ttgggcagcggcaaactgttgtcag

SEQ ID NO: 27086 - DNA, 25 bp, Homo sapiens
ctgttgtcagaacattgaatgcaac

SEQ ID NO: 27087 - DNA, 25 bp, Homo sapiens
gcaactggggaagaaataattcagc

SEQ ID NO: 27088 - DNA, 25 bp, Homo sapiens
tgaatgcaactggggaagaaataat

SEQ ID NO: 27089 - DNA, 25 bp, Homo sapiens
tcagcaatcctcaaaaacagatgcc

SEQ ID NO: 27090 - DNA, 25 bp, Homo sapiens
aagaaataattcagcaatcctcaaa

SEQ ID NO: 27091 - DNA, 25 bp, Homo sapiens
atgccagtattctacaggaaaaatt

SEQ ID NO: 27092 - DNA, 25 bp, Homo sapiens
aatcctcaaaaacagatgccagtat

SEQ ID NO: 27093 - DNA, 25 bp, Homo sapiens
aaattgggaagcctgaatctgcggt

SEQ ID NO: 27094 - DNA, 25 bp, Homo sapiens
gcggtggcaggaggtctgcaaacag

SEQ ID NO: 27095 - DNA, 25 bp, Homo sapiens
aggaaaaattgggaagcctgaatct

SEQ ID NO: 27096 - DNA, 25 bp, Homo sapiens
aacagctgtcagacagaaaaaagag

SEQ ID NO: 27097 - DNA, 25 bp, Homo sapiens
gcctgaatctgcggtggcaggaggt

SEQ ID NO: 27098 - DNA, 25 bp, Homo sapiens
ctgtcagacagaaaaaagaggtagg

SEQ ID NO: 27099 - DNA, 25 bp, Homo sapiens
ggcaggaggtctgcaaacagctgtc

SEQ ID NO: 27100 - DNA, 25 bp, Homo sapiens
agacagaaaaaagaggtagggcgac

SEQ ID NO: 27101 - DNA, 25 bp, Homo sapiens
gaaaaaagaggtagggcgacagatc

SEQ ID NO: 27102 - DNA, 25 bp, Homo sapiens
aagaggtagggcgacagatctaata

SEQ ID NO: 27103 - DNA, 25 bp, Homo sapiens
gtagggcgacagatctaataggaat

SEQ ID NO: 27104 - DNA, 20 bp, Homo sapiens
gttttgcctttttggtatct

SEQ ID NO: 27105 - DNA, 20 bp, Homo sapiens
ttttgcctttttggtatctt

SEQ ID NO: 27106 - DNA, 20 bp, Homo sapiens
cctttttggtatcttacagg

SEQ ID NO: 27107 - DNA, 20 bp, Homo sapiens
ttggtatcttacaggaactc

SEQ ID NO: 27108 - DNA, 20 bp, Homo sapiens
atcttacaggaactccagga

SEQ ID NO: 27109 - DNA, 20 bp, Homo sapiens
acaggaactccaggatggca

SEQ ID NO: 27110 - DNA, 20 bp, Homo sapiens
aactccaggatggcattggg

SEQ ID NO: 27111 - DNA, 20 bp, Homo sapiens
caggatggcattgggcagcg

SEQ ID NO: 27112 - DNA, 20 bp, Homo sapiens
cagcggcaaactgttgtcag

SEQ ID NO: 27113 - DNA, 20 bp, Homo sapiens
gtcagaacattgaatgcaac

SEQ ID NO: 27114 - DNA, 20 bp, Homo sapiens
gcaactggggaagaaataat

SEQ ID NO: 27115 - DNA, 20 bp, Homo sapiens
ataattcagcaatcctcaaa

SEQ ID NO: 27116 - DNA, 20 bp, Homo sapiens
tcaaaaacagatgccagtat

SEQ ID NO: 27117 - DNA, 20 bp, Homo sapiens
agtattctacaggaaaaatt

SEQ ID NO: 27118 - DNA, 20 bp, Homo sapiens
aaattgggaagcctgaatct

SEQ ID NO: 27119 - DNA, 20 bp, Homo sapiens
aatctgcggtggcaggaggt

SEQ ID NO: 27120 - DNA, 20 bp, Homo sapiens
gaggtctgcaaacagctgtc

SEQ ID NO: 27121 - DNA, 20 bp, Homo sapiens
ctgtcagacagaaaaaagag

SEQ ID NO: 27122 - DNA, 20 bp, Homo sapiens
agacagaaaaaagaggtagg

SEQ ID NO: 27123 - DNA, 20 bp, Homo sapiens
gaaaaaagaggtagggcgac

SEQ ID NO: 27124 - DNA, 20 bp, Homo sapiens
aagaggtagggcgacagatc

SEQ ID NO: 27125 - DNA, 20 bp, Homo sapiens
gtagggcgacagatctaata

SEQ ID NO: 27126 - DNA, 20 bp, Homo sapiens
gcgacagatctaataggaat

SEQ ID NO: 27127 - DNA, 25 bp, Homo sapiens
gtaattttattttctcaaatccccc

SEQ ID NO: 27128 - DNA, 25 bp, Homo sapiens
tcaaggtaattttattttctcaaat

SEQ ID NO: 27129 - DNA, 25 bp, Homo sapiens
ttttattcttctttctccaggctag

SEQ ID NO: 27130 - DNA, 25 bp, Homo sapiens
gcaagtcaaggtaattttattttct

SEQ ID NO: 27131 - DNA, 25 bp, Homo sapiens
ttcttctttctccaggctagaagaa

SEQ ID NO: 27132 - DNA, 25 bp, Homo sapiens
cttgagcaagtcaaggtaattttat

SEQ ID NO: 27133 - DNA, 25 bp, Homo sapiens
ctttctccaggctagaagaacaaaa

SEQ ID NO: 27134 - DNA, 25 bp, Homo sapiens
aaaagcttgagcaagtcaaggtaat

SEQ ID NO: 27135 - DNA, 25 bp, Homo sapiens
tccaggctagaagaacaaaagaata

SEQ ID NO: 27136 - DNA, 25 bp, Homo sapiens
aaaagaaaagcttgagcaagtcaag

SEQ ID NO: 27137 - DNA, 25 bp, Homo sapiens
gctagaagaacaaaagaatatcttg

SEQ ID NO: 27138 - DNA, 25 bp, Homo sapiens
cctggaaaagagcagcaactaaaag

SEQ ID NO: 27139 - DNA, 25 bp, Homo sapiens
ttgctagtatcccacttgaacctgg

SEQ ID NO: 27140 - DNA, 25 bp, Homo sapiens
tatcttgtcagaatttcaaagagat

SEQ ID NO: 27141 - DNA, 25 bp, Homo sapiens
gttggaggaagcagataacattgct

SEQ ID NO: 27142 - DNA, 25 bp, Homo sapiens
tcaaagagatttaaatgaatttgtt

SEQ ID NO: 27143 - DNA, 25 bp, Homo sapiens
ttaaatgaatttgttttatggttgg

SEQ ID NO: 27144 - DNA, 25 bp, Homo sapiens
tgaatttgttttatggttggaggaa

SEQ ID NO: 27145 - DNA, 25 bp, Homo sapiens
tgtcagaatttcaaagagatttaaa

SEQ ID NO: 27146 - DNA, 25 bp, Homo sapiens
agaagaacaaaagaatatcttgtca

SEQ ID NO: 27147 - DNA, 25 bp, Homo sapiens
taacattgctagtatcccacttgaa

SEQ ID NO: 27148 - DNA, 25 bp, Homo sapiens
aggctagaagaacaaaagaatatct

SEQ ID NO: 27149 - DNA, 25 bp, Homo sapiens
cccacttgaacctggaaaagagcag

SEQ ID NO: 27150 - DNA, 25 bp, Homo sapiens
tctccaggctagaagaacaaaagaa

SEQ ID NO: 27151 - DNA, 25 bp, Homo sapiens
aaaagagcagcaactaaaagaaaag

SEQ ID NO: 27152 - DNA, 25 bp, Homo sapiens
ttctttctccaggctagaagaacaa

SEQ ID NO: 27153 - DNA, 25 bp, Homo sapiens
tattcttctttctccaggctagaag

SEQ ID NO: 27154 - DNA, 25 bp, Homo sapiens
aattttattcttctttctccaggct

SEQ ID NO: 27155 - DNA, 25 bp, Homo sapiens
aacaattttattcttctttctccag

SEQ ID NO: 27156 - DNA, 20 bp, Homo sapiens
aacaattttattcttctttc

SEQ ID NO: 27157 - DNA, 20 bp, Homo sapiens
aattttattcttctttctcc

SEQ ID NO: 27158 - DNA, 20 bp, Homo sapiens
tattcttctttctccaggct

SEQ ID NO: 27159 - DNA, 20 bp, Homo sapiens
ttctttctccaggctagaag

SEQ ID NO: 27160 - DNA, 20 bp, Homo sapiens
tctccaggctagaagaacaa

SEQ ID NO: 27161 - DNA, 20 bp, Homo sapiens
aggctagaagaacaaaagaa

SEQ ID NO: 27162 - DNA, 20 bp, Homo sapiens
aacaaaagaatatcttgtca

SEQ ID NO: 27163 - DNA, 20 bp, Homo sapiens
tgtcagaatttcaaagagat

SEQ ID NO: 27164 - DNA, 20 bp, Homo sapiens
gagatttaaatgaatttgtt

SEQ ID NO: 27165 - DNA, 20 bp, Homo sapiens
ttgttttatggttggaggaa

SEQ ID NO: 27166 - DNA, 20 bp, Homo sapiens
aggaagcagataacattgct

SEQ ID NO: 27167 - DNA, 20 bp, Homo sapiens
ttgctagtatcccacttgaa

SEQ ID NO: 27168 - DNA, 20 bp, Homo sapiens
ttgaacctggaaaagagcag

SEQ ID NO: 27169 - DNA, 20 bp, Homo sapiens
agcagcaactaaaagaaaag

SEQ ID NO: 27170 - DNA, 20 bp, Homo sapiens
aaaagcttgagcaagtcaag

SEQ ID NO: 27171 - DNA, 20 bp, Homo sapiens
cttgagcaagtcaaggtaat

SEQ ID NO: 27172 - DNA, 20 bp, Homo sapiens
gcaagtcaaggtaattttat

SEQ ID NO: 27173 - DNA, 20 bp, Homo sapiens
tcaaggtaattttattttct

SEQ ID NO: 27174 - DNA, 20 bp, Homo sapiens
gtaattttattttctcaaat

SEQ ID NO: 27175 - DNA, 20 bp, Homo sapiens
tttattttctcaaatccccc

SEQ ID NO: 27176 - DNA, 25 bp, Homo sapiens
acgttgttgcatttgtctgtttcag

SEQ ID NO: 27177 - DNA, 25 bp, Homo sapiens
gttgcatttgtctgtttcagttact

SEQ ID NO: 27178 - DNA, 25 bp, Homo sapiens
atttgtctgtttcagttactggtgg

SEQ ID NO: 27179 - DNA, 25 bp, Homo sapiens
tctgtttcagttactggtggaagag

SEQ ID NO: 27180 - DNA, 25 bp, Homo sapiens
ttcagttactggtggaagagttgcc

SEQ ID NO: 27181 - DNA, 25 bp, Homo sapiens
ttactggtggaagagttgcccctgc

SEQ ID NO: 27182 - DNA, 25 bp, Homo sapiens
ggtggaagagttgcccctgcgccag

SEQ ID NO: 27183 - DNA, 25 bp, Homo sapiens
gccagggaattctcaaacaattaaa

SEQ ID NO: 27184 - DNA, 25 bp, Homo sapiens
cctgcgccagggaattctcaaacaa

SEQ ID NO: 27185 - DNA, 25 bp, Homo sapiens
ttaaatgaaactggaggacccgtgc

SEQ ID NO: 27186 - DNA, 25 bp, Homo sapiens
tctcaaacaattaaatgaaactgga

SEQ ID NO: 27187 - DNA, 25 bp, Homo sapiens
cgtgcttgtaagtgctcccataagc

SEQ ID NO: 27188 - DNA, 25 bp, Homo sapiens
tgaaactggaggacccgtgcttgta

SEQ ID NO: 27189 - DNA, 25 bp, Homo sapiens
taagcccagaagagcaagataaact

SEQ ID NO: 27190 - DNA, 25 bp, Homo sapiens
aaacttgaaaataagctcaagcaga

SEQ ID NO: 27191 - DNA, 25 bp, Homo sapiens
tcccataagcccagaagagcaagat

SEQ ID NO: 27192 - DNA, 25 bp, Homo sapiens
gcagacaaatctccagtggataaag

SEQ ID NO: 27193 - DNA, 25 bp, Homo sapiens
agagcaagataaacttgaaaataag

SEQ ID NO: 27194 - DNA, 25 bp, Homo sapiens
caaatctccagtggataaaggttag

SEQ ID NO: 27195 - DNA, 25 bp, Homo sapiens
tgaaaataagctcaagcagacaaat

SEQ ID NO: 27196 - DNA, 25 bp, Homo sapiens
ctccagtggataaaggttagacatt

SEQ ID NO: 27197 - DNA, 25 bp, Homo sapiens
gtggataaaggttagacattaacca

SEQ ID NO: 27198 - DNA, 25 bp, Homo sapiens
taaaggttagacattaaccatctct

SEQ ID NO: 27199 - DNA, 25 bp, Homo sapiens
gttagacattaaccatctcttccgt

SEQ ID NO: 27200 - DNA, 20 bp, Homo sapiens
acgttgttgcatttgtctgt

SEQ ID NO: 27201 - DNA, 20 bp, Homo sapiens
gttgcatttgtctgtttcag

SEQ ID NO: 27202 - DNA, 20 bp, Homo sapiens
atttgtctgtttcagttact

SEQ ID NO: 27203 - DNA, 20 bp, Homo sapiens
tctgtttcagttactggtgg

SEQ ID NO: 27204 - DNA, 20 bp, Homo sapiens
ttcagttactggtggaagag

SEQ ID NO: 27205 - DNA, 20 bp, Homo sapiens
ttactggtggaagagttgcc

SEQ ID NO: 27206 - DNA, 20 bp, Homo sapiens
aagagttgcccctgcgccag

SEQ ID NO: 27207 - DNA, 20 bp, Homo sapiens
gccagggaattctcaaacaa

SEQ ID NO: 27208 - DNA, 20 bp, Homo sapiens
aacaattaaatgaaactgga

SEQ ID NO: 27209 - DNA, 20 bp, Homo sapiens
ctggaggacccgtgcttgta

SEQ ID NO: 27210 - DNA, 20 bp, Homo sapiens
ttgtaagtgctcccataagc

SEQ ID NO: 27211 - DNA, 20 bp, Homo sapiens
taagcccagaagagcaagat

SEQ ID NO: 27212 - DNA, 20 bp, Homo sapiens
aagataaacttgaaaataag

SEQ ID NO: 27213 - DNA, 20 bp, Homo sapiens
ataagctcaagcagacaaat

SEQ ID NO: 27214 - DNA, 20 bp, Homo sapiens
caaatctccagtggataaag

SEQ ID NO: 27215 - DNA, 20 bp, Homo sapiens
ctccagtggataaaggttag

SEQ ID NO: 27216 - DNA, 20 bp, Homo sapiens
gtggataaaggttagacatt

SEQ ID NO: 27217 - DNA, 20 bp, Homo sapiens
taaaggttagacattaacca

SEQ ID NO: 27218 - DNA, 20 bp, Homo sapiens
gttagacattaaccatctct

SEQ ID NO: 27219 - DNA, 20 bp, Homo sapiens
acattaaccatctcttccgt

SEQ ID NO: 27220 - DNA, 25 bp, Homo sapiens
tttttaaaatgtattttcctttcag

SEQ ID NO: 27221 - DNA, 25 bp, Homo sapiens
ttttaaaatgtattttcctttcagg

SEQ ID NO: 27222 - DNA, 25 bp, Homo sapiens
aaaatgtattttcctttcaggtttc

SEQ ID NO: 27223 - DNA, 25 bp, Homo sapiens
aaatgtattttcctttcaggtttcc

SEQ ID NO: 27224 - DNA, 25 bp, Homo sapiens
gtattttcctttcaggtttccagag

SEQ ID NO: 27225 - DNA, 25 bp, Homo sapiens
tattttcctttcaggtttccagagc

SEQ ID NO: 27226 - DNA, 25 bp, Homo sapiens
ttcctttcaggtttccagagcttta

SEQ ID NO: 27227 - DNA, 25 bp, Homo sapiens
tcctttcaggtttccagagctttac

SEQ ID NO: 27228 - DNA, 25 bp, Homo sapiens
ttcaggtttccagagctttacctga

SEQ ID NO: 27229 - DNA, 25 bp, Homo sapiens
tcaggtttccagagctttacctgag

SEQ ID NO: 27230 - DNA, 25 bp, Homo sapiens
gtttccagagctttacctgagaaac

SEQ ID NO: 27231 - DNA, 25 bp, Homo sapiens
tttccagagctttacctgagaaaca

SEQ ID NO: 27232 - DNA, 25 bp, Homo sapiens
tttacctgagaaacaaggagaaatt

SEQ ID NO: 27233 - DNA, 25 bp, Homo sapiens
aaacaaggagaaattgaagctcaaa

SEQ ID NO: 27234 - DNA, 25 bp, Homo sapiens
aggagaaattgaagctcaaataaaa

SEQ ID NO: 27235 - DNA, 25 bp, Homo sapiens
tcaaataaaagaccttgggcagctt

SEQ ID NO: 27236 - DNA, 25 bp, Homo sapiens
agcttgaaaaaaagcttgaagacct

SEQ ID NO: 27237 - DNA, 25 bp, Homo sapiens
tgggcagcttgaaaaaaagcttgaa

SEQ ID NO: 27238 - DNA, 25 bp, Homo sapiens
gaccttgaagagcagttaaatcatc

SEQ ID NO: 27239 - DNA, 25 bp, Homo sapiens
aaagcttgaagaccttgaagagcag

SEQ ID NO: 27240 - DNA, 25 bp, Homo sapiens
tcatctgctgctgtggttatctcct

SEQ ID NO: 27241 - DNA, 25 bp, Homo sapiens
tgaagagcagttaaatcatctgctg

SEQ ID NO: 27242 - DNA, 25 bp, Homo sapiens
ctcctattaggaatcagttggaaat

SEQ ID NO: 27243 - DNA, 25 bp, Homo sapiens
gaaatttataaccaaccaaaccaag

SEQ ID NO: 27244 - DNA, 25 bp, Homo sapiens
gttatctcctattaggaatcagttg

SEQ ID NO: 27245 - DNA, 25 bp, Homo sapiens
ccaagaaggaccatttgacgttaag

SEQ ID NO: 27246 - DNA, 25 bp, Homo sapiens
gaatcagttggaaatttataaccaa

SEQ ID NO: 27247 - DNA, 25 bp, Homo sapiens
aaggaccatttgacgttaaggtagg

SEQ ID NO: 27248 - DNA, 25 bp, Homo sapiens
ttataaccaaccaaaccaagaagga

SEQ ID NO: 27249 - DNA, 25 bp, Homo sapiens
ccatttgacgttaaggtagggaact

SEQ ID NO: 27250 - DNA, 25 bp, Homo sapiens
tgacgttaaggtagggaactttttg

SEQ ID NO: 27251 - DNA, 25 bp, Homo sapiens
ttaaggtagggaactttttgcttta

SEQ ID NO: 27252 - DNA, 25 bp, Homo sapiens
gtagggaactttttgctttaaatat

SEQ ID NO: 27253 - DNA, 20 bp, Homo sapiens
tttttaaaatgtattttcct

SEQ ID NO: 27254 - DNA, 20 bp, Homo sapiens
ttttaaaatgtattttcctt

SEQ ID NO: 27255 - DNA, 20 bp, Homo sapiens
aaatgtattttcctttcagg

SEQ ID NO: 27256 - DNA, 20 bp, Homo sapiens
tattttcctttcaggtttcc

SEQ ID NO: 27257 - DNA, 20 bp, Homo sapiens
tcctttcaggtttccagagc

SEQ ID NO: 27258 - DNA, 20 bp, Homo sapiens
tcaggtttccagagctttac

SEQ ID NO: 27259 - DNA, 20 bp, Homo sapiens
tttccagagctttacctgag

SEQ ID NO: 27260 - DNA, 20 bp, Homo sapiens
ctgagaaacaaggagaaatt

SEQ ID NO: 27261 - DNA, 20 bp, Homo sapiens
aaattgaagctcaaataaaa

SEQ ID NO: 27262 - DNA, 20 bp, Homo sapiens
taaaagaccttgggcagctt

SEQ ID NO: 27263 - DNA, 20 bp, Homo sapiens
agcttgaaaaaaagcttgaa

SEQ ID NO: 27264 - DNA, 20 bp, Homo sapiens
ttgaagaccttgaagagcag

SEQ ID NO: 27265 - DNA, 20 bp, Homo sapiens
agcagttaaatcatctgctg

SEQ ID NO: 27266 - DNA, 20 bp, Homo sapiens
tgctgctgtggttatctcct

SEQ ID NO: 27267 - DNA, 20 bp, Homo sapiens
ctcctattaggaatcagttg

SEQ ID NO: 27268 - DNA, 20 bp, Homo sapiens
agttggaaatttataaccaa

SEQ ID NO: 27269 - DNA, 20 bp, Homo sapiens
accaaccaaaccaagaagga

SEQ ID NO: 27270 - DNA, 20 bp, Homo sapiens
aaggaccatttgacgttaag

SEQ ID NO: 27271 - DNA, 20 bp, Homo sapiens
ccatttgacgttaaggtagg

SEQ ID NO: 27272 - DNA, 20 bp, Homo sapiens
tgacgttaaggtagggaact

SEQ ID NO: 27273 - DNA, 20 bp, Homo sapiens
ttaaggtagggaactttttg

SEQ ID NO: 27274 - DNA, 20 bp, Homo sapiens
gtagggaactttttgcttta

SEQ ID NO: 27275 - DNA, 20 bp, Homo sapiens
gaactttttgctttaaatat

SEQ ID NO: 27276 - DNA, 25 bp, Homo sapiens
gcactatatgggttcttttccccag

SEQ ID NO: 27277 - DNA, 25 bp, Homo sapiens
actatatgggttcttttccccagga

SEQ ID NO: 27278 - DNA, 25 bp, Homo sapiens
atatgggttcttttccccaggaaac

SEQ ID NO: 27279 - DNA, 25 bp, Homo sapiens
atgggttcttttccccaggaaactg

SEQ ID NO: 27280 - DNA, 25 bp, Homo sapiens
ggttcttttccccaggaaactgaaa

SEQ ID NO: 27281 - DNA, 25 bp, Homo sapiens
ttcttttccccaggaaactgaaata

SEQ ID NO: 27282 - DNA, 25 bp, Homo sapiens
ttttccccaggaaactgaaatagca

SEQ ID NO: 27283 - DNA, 25 bp, Homo sapiens
ttccccaggaaactgaaatagcagt

SEQ ID NO: 27284 - DNA, 25 bp, Homo sapiens
cccaggaaactgaaatagcagttca

SEQ ID NO: 27285 - DNA, 25 bp, Homo sapiens
caggaaactgaaatagcagttcaag

SEQ ID NO: 27286 - DNA, 25 bp, Homo sapiens
gaaactgaaatagcagttcaagcta

SEQ ID NO: 27287 - DNA, 25 bp, Homo sapiens
aactgaaatagcagttcaagctaaa

SEQ ID NO: 27288 - DNA, 25 bp, Homo sapiens
tcaagctaaacaaccggatgtggaa

SEQ ID NO: 27289 - DNA, 25 bp, Homo sapiens
tggaagagattttgtctaaagggca

SEQ ID NO: 27290 - DNA, 25 bp, Homo sapiens
ggatgtggaagagattttgtctaaa

SEQ ID NO: 27291 - DNA, 25 bp, Homo sapiens
gggcagcatttgtacaaggaaaaac

SEQ ID NO: 27292 - DNA, 25 bp, Homo sapiens
tttgtctaaagggcagcatttgtac

SEQ ID NO: 27293 - DNA, 25 bp, Homo sapiens
aaaaccagccactcagccagtgaag

SEQ ID NO: 27294 - DNA, 25 bp, Homo sapiens
gcatttgtacaaggaaaaaccagcc

SEQ ID NO: 27295 - DNA, 25 bp, Homo sapiens
cagccactcagccagtgaaggtaat

SEQ ID NO: 27296 - DNA, 25 bp, Homo sapiens
actcagccagtgaaggtaatgaagc

SEQ ID NO: 27297 - DNA, 25 bp, Homo sapiens
gccagtgaaggtaatgaagcaacct

SEQ ID NO: 27298 - DNA, 25 bp, Homo sapiens
tgaaggtaatgaagcaacctctagc

SEQ ID NO: 27299 - DNA, 25 bp, Homo sapiens
gtaatgaagcaacctctagcaatat

SEQ ID NO: 27300 - DNA, 20 bp, Homo sapiens
gcactatatgggttcttttc

SEQ ID NO: 27301 - DNA, 20 bp, Homo sapiens
actatatgggttcttttccc

SEQ ID NO: 27302 - DNA, 20 bp, Homo sapiens
atgggttcttttccccagga

SEQ ID NO: 27303 - DNA, 20 bp, Homo sapiens
ttcttttccccaggaaactg

SEQ ID NO: 27304 - DNA, 20 bp, Homo sapiens
ttccccaggaaactgaaata

SEQ ID NO: 27305 - DNA, 20 bp, Homo sapiens
caggaaactgaaatagcagt

SEQ ID NO: 27306 - DNA, 20 bp, Homo sapiens
aactgaaatagcagttcaag

SEQ ID NO: 27307 - DNA, 20 bp, Homo sapiens
aaatagcagttcaagctaaa

SEQ ID NO: 27308 - DNA, 20 bp, Homo sapiens
ctaaacaaccggatgtggaa

SEQ ID NO: 27309 - DNA, 20 bp, Homo sapiens
tggaagagattttgtctaaa

SEQ ID NO: 27310 - DNA, 20 bp, Homo sapiens
ctaaagggcagcatttgtac

SEQ ID NO: 27311 - DNA, 20 bp, Homo sapiens
tgtacaaggaaaaaccagcc

SEQ ID NO: 27312 - DNA, 20 bp, Homo sapiens
cagccactcagccagtgaag

SEQ ID NO: 27313 - DNA, 20 bp, Homo sapiens
actcagccagtgaaggtaat

SEQ ID NO: 27314 - DNA, 20 bp, Homo sapiens
gccagtgaaggtaatgaagc

SEQ ID NO: 27315 - DNA, 20 bp, Homo sapiens
tgaaggtaatgaagcaacct

SEQ ID NO: 27316 - DNA, 20 bp, Homo sapiens
gtaatgaagcaacctctagc

SEQ ID NO: 27317 - DNA, 20 bp, Homo sapiens
gaagcaacctctagcaatat

SEQ ID NO: 27318 - DNA, 25 bp, Homo sapiens
taatgtgtatgcttttctgttaaag

SEQ ID NO: 27319 - DNA, 25 bp, Homo sapiens
gtgtatgcttttctgttaaagagga

SEQ ID NO: 27320 - DNA, 25 bp, Homo sapiens
tgtatgcttttctgttaaagaggaa

SEQ ID NO: 27321 - DNA, 25 bp, Homo sapiens
tgcttttctgttaaagaggaagtta

SEQ ID NO: 27322 - DNA, 25 bp, Homo sapiens
gcttttctgttaaagaggaagttag

SEQ ID NO: 27323 - DNA, 25 bp, Homo sapiens
ttctgttaaagaggaagttagaaga

SEQ ID NO: 27324 - DNA, 25 bp, Homo sapiens
tctgttaaagaggaagttagaagat

SEQ ID NO: 27325 - DNA, 25 bp, Homo sapiens
ttaaagaggaagttagaagatctga

SEQ ID NO: 27326 - DNA, 25 bp, Homo sapiens
taaagaggaagttagaagatctgag

SEQ ID NO: 27327 - DNA, 25 bp, Homo sapiens
gaggaagttagaagatctgagctct

SEQ ID NO: 27328 - DNA, 25 bp, Homo sapiens
aggaagttagaagatctgagctctg

SEQ ID NO: 27329 - DNA, 25 bp, Homo sapiens
gaagatctgagctctgagtggaagg

SEQ ID NO: 27330 - DNA, 25 bp, Homo sapiens
gagtggaaggcggtaaaccgtttac

SEQ ID NO: 27331 - DNA, 25 bp, Homo sapiens
tttacttcaagagctgagggcaaag

SEQ ID NO: 27332 - DNA, 25 bp, Homo sapiens
aaccgtttacttcaagagctgaggg

SEQ ID NO: 27333 - DNA, 25 bp, Homo sapiens
caaagcagcctgacctagctcctgg

SEQ ID NO: 27334 - DNA, 25 bp, Homo sapiens
gagctgagggcaaagcagcctgacc

SEQ ID NO: 27335 - DNA, 25 bp, Homo sapiens
cctggactgaccactattggagcct

SEQ ID NO: 27336 - DNA, 25 bp, Homo sapiens
cagcctgacctagctcctggactga

SEQ ID NO: 27337 - DNA, 25 bp, Homo sapiens
actgaccactattggagcctgtaag

SEQ ID NO: 27338 - DNA, 25 bp, Homo sapiens
ccactattggagcctgtaagtatac

SEQ ID NO: 27339 - DNA, 25 bp, Homo sapiens
attggagcctgtaagtatactggat

SEQ ID NO: 27340 - DNA, 25 bp, Homo sapiens
agcctgtaagtatactggatcccat

SEQ ID NO: 27341 - DNA, 25 bp, Homo sapiens
gtaagtatactggatcccattctct

SEQ ID NO: 27342 - DNA, 20 bp, Homo sapiens
taatgtgtatgcttttctgt

SEQ ID NO: 27343 - DNA, 20 bp, Homo sapiens
gtgtatgcttttctgttaaa

SEQ ID NO: 27344 - DNA, 20 bp, Homo sapiens
tgcttttctgttaaagagga

SEQ ID NO: 27345 - DNA, 20 bp, Homo sapiens
ttctgttaaagaggaagtta

SEQ ID NO: 27346 - DNA, 20 bp, Homo sapiens
ttaaagaggaagttagaaga

SEQ ID NO: 27347 - DNA, 20 bp, Homo sapiens
gaggaagttagaagatctga

SEQ ID NO: 27348 - DNA, 20 bp, Homo sapiens
tctgagctctgagtggaagg

SEQ ID NO: 27349 - DNA, 20 bp, Homo sapiens
gaaggcggtaaaccgtttac

SEQ ID NO: 27350 - DNA, 20 bp, Homo sapiens
tttacttcaagagctgaggg

SEQ ID NO: 27351 - DNA, 20 bp, Homo sapiens
gagggcaaagcagcctgacc

SEQ ID NO: 27352 - DNA, 20 bp, Homo sapiens
tgacctagctcctggactga

SEQ ID NO: 27353 - DNA, 20 bp, Homo sapiens
actgaccactattggagcct

SEQ ID NO: 27354 - DNA, 20 bp, Homo sapiens
ccactattggagcctgtaag

SEQ ID NO: 27355 - DNA, 20 bp, Homo sapiens
attggagcctgtaagtatac

SEQ ID NO: 27356 - DNA, 20 bp, Homo sapiens
agcctgtaagtatactggat

SEQ ID NO: 27357 - DNA, 20 bp, Homo sapiens
gtaagtatactggatcccat

SEQ ID NO: 27358 - DNA, 20 bp, Homo sapiens
tatactggatcccattctct

SEQ ID NO: 27359 - DNA, 26 bp, Homo sapiens
ttttgcaaaaacccaaaatattttag

SEQ ID NO: 27360 - DNA, 26 bp, Homo sapiens
tttgcaaaaacccaaaatattttagc

SEQ ID NO: 27361 - DNA, 26 bp, Homo sapiens
aaaaacccaaaatattttagctccta

SEQ ID NO: 27362 - DNA, 25 bp, Homo sapiens
aacccaaaatattttagctcctact

SEQ ID NO: 27363 - DNA, 25 bp, Homo sapiens
cccaaaatattttagctcctactca

SEQ ID NO: 27364 - DNA, 26 bp, Homo sapiens
cccaaaatattttagctcctactcag

SEQ ID NO: 27365 - DNA, 25 bp, Homo sapiens
aatattttagctcctactcagactg

SEQ ID NO: 27366 - DNA, 26 bp, Homo sapiens
aatattttagctcctactcagactgt

SEQ ID NO: 27367 - DNA, 26 bp, Homo sapiens
tttagctcctactcagactgttactc

SEQ ID NO: 27368 - DNA, 25 bp, Homo sapiens
agctcctactcagactgttactctg

SEQ ID NO: 27369 - DNA, 26 bp, Homo sapiens
ctcctactcagactgttactctggtg

SEQ ID NO: 27370 - DNA, 25 bp, Homo sapiens
ctactcagactgttactctggtgac

SEQ ID NO: 27371 - DNA, 26 bp, Homo sapiens
ttactctggtgacacaacctgtggtt

SEQ ID NO: 27372 - DNA, 25 bp, Homo sapiens
cagactgttactctggtgacacaac

SEQ ID NO: 27373 - DNA, 26 bp, Homo sapiens
acctgtggttactaaggaaactgcca

SEQ ID NO: 27374 - DNA, 26 bp, Homo sapiens
gaaactgccatctccaaactagaaat

SEQ ID NO: 27375 - DNA, 25 bp, Homo sapiens
ctccaaactagaaatgccatcttcc

SEQ ID NO: 27376 - DNA, 26 bp, Homo sapiens
aactagaaatgccatcttccttgatg

SEQ ID NO: 27377 - DNA, 26 bp, Homo sapiens
ttccttgatgttggaggtacctgctc

SEQ ID NO: 27378 - DNA, 25 bp, Homo sapiens
gttggaggtacctgctctggcagat

SEQ ID NO: 27379 - DNA, 26 bp, Homo sapiens
atttcaaccgggcttggacagaactt

SEQ ID NO: 27380 - DNA, 26 bp, Homo sapiens
gtacctgctctggcagatttcaaccg

SEQ ID NO: 27381 - DNA, 26 bp, Homo sapiens
gacagaacttaccgactggctttctc

SEQ ID NO: 27382 - DNA, 25 bp, Homo sapiens
ccgggcttggacagaacttaccgac

SEQ ID NO: 27383 - DNA, 26 bp, Homo sapiens
tggctttctctgcttgatcaagttat

SEQ ID NO: 27384 - DNA, 25 bp, Homo sapiens
acttaccgactggctttctctgctt

SEQ ID NO: 27385 - DNA, 26 bp, Homo sapiens
atcaagttataaaatcacagagggtg

SEQ ID NO: 27386 - DNA, 26 bp, Homo sapiens
acagagggtgatggtgggtgaccttg

SEQ ID NO: 27387 - DNA, 25 bp, Homo sapiens
agttataaaatcacagagggtgatg

SEQ ID NO: 27388 - DNA, 26 bp, Homo sapiens
tcaacgagatgatcatcaagcagaag

SEQ ID NO: 27389 - DNA, 26 bp, Homo sapiens
caacgagatgatcatcaagcagaagg

SEQ ID NO: 27390 - DNA, 26 bp, Homo sapiens
ggtgaccttgaggatatcaacgagat

SEQ ID NO: 27391 - DNA, 26 bp, Homo sapiens
agatgatcatcaagcagaaggtatga

SEQ ID NO: 27392 - DNA, 26 bp, Homo sapiens
caagcagaaggtatgagaaaaaatga

SEQ ID NO: 27393 - DNA, 26 bp, Homo sapiens
atcatcaagcagaaggtatgagaaaa

SEQ ID NO: 27394 - DNA, 26 bp, Homo sapiens
agaaggtatgagaaaaaatgataaaa

SEQ ID NO: 27395 - DNA, 26 bp, Homo sapiens
gtatgagaaaaaatgataaaagttgg

SEQ ID NO: 27396 - DNA, 20 bp, Homo sapiens
tttgcaaaaacccaaaatat

SEQ ID NO: 27397 - DNA, 20 bp, Homo sapiens
gcaaaaacccaaaatatttt

SEQ ID NO: 27398 - DNA, 20 bp, Homo sapiens
aacccaaaatattttagctc

SEQ ID NO: 27399 - DNA, 20 bp, Homo sapiens
aaaatattttagctcctact

SEQ ID NO: 27400 - DNA, 20 bp, Homo sapiens
attttagctcctactcagac

SEQ ID NO: 27401 - DNA, 20 bp, Homo sapiens
agctcctactcagactgtta

SEQ ID NO: 27402 - DNA, 20 bp, Homo sapiens
ctactcagactgttactctg

SEQ ID NO: 27403 - DNA, 20 bp, Homo sapiens
ctctggtgacacaacctgtg

SEQ ID NO: 27404 - DNA, 20 bp, Homo sapiens
ctgtggttactaaggaaact

SEQ ID NO: 27405 - DNA, 20 bp, Homo sapiens
aaactgccatctccaaacta

SEQ ID NO: 27406 - DNA, 20 bp, Homo sapiens
aactagaaatgccatcttcc

SEQ ID NO: 27407 - DNA, 20 bp, Homo sapiens
cttccttgatgttggaggta

SEQ ID NO: 27408 - DNA, 20 bp, Homo sapiens
aggtacctgctctggcagat

SEQ ID NO: 27409 - DNA, 20 bp, Homo sapiens
cagatttcaaccgggcttgg

SEQ ID NO: 27410 - DNA, 20 bp, Homo sapiens
cttggacagaacttaccgac

SEQ ID NO: 27411 - DNA, 20 bp, Homo sapiens
ccgactggctttctctgctt

SEQ ID NO: 27412 - DNA, 20 bp, Homo sapiens
tgcttgatcaagttataaaa

SEQ ID NO: 27413 - DNA, 20 bp, Homo sapiens
taaaatcacagagggtgatg

SEQ ID NO: 27414 - DNA, 20 bp, Homo sapiens
tgatggtgggtgaccttgag

SEQ ID NO: 27415 - DNA, 20 bp, Homo sapiens
ttgaggatatcaacgagatg

SEQ ID NO: 27416 - DNA, 20 bp, Homo sapiens
agatgatcatcaagcagaag

SEQ ID NO: 27417 - DNA, 20 bp, Homo sapiens
atcatcaagcagaaggtatg

SEQ ID NO: 27418 - DNA, 20 bp, Homo sapiens
caagcagaaggtatgagaaa

SEQ ID NO: 27419 - DNA, 20 bp, Homo sapiens
agaaggtatgagaaaaaatg

SEQ ID NO: 27420 - DNA, 20 bp, Homo sapiens
gtatgagaaaaaatgataaa

SEQ ID NO: 27421 - DNA, 20 bp, Homo sapiens
agaaaaaatgataaaagttg

SEQ ID NO: 27422 - DNA, 25 bp, Homo sapiens
tactaagggatatttgttcttacag

SEQ ID NO: 27423 - DNA, 25 bp, Homo sapiens
taagggatatttgttcttacaggca

SEQ ID NO: 27424 - DNA, 25 bp, Homo sapiens
agggatatttgttcttacaggcaac

SEQ ID NO: 27425 - DNA, 25 bp, Homo sapiens
gatatttgttcttacaggcaacaat

SEQ ID NO: 27426 - DNA, 25 bp, Homo sapiens
tatttgttcttacaggcaacaatgc

SEQ ID NO: 27427 - DNA, 25 bp, Homo sapiens
ttgttcttacaggcaacaatgcagg

SEQ ID NO: 27428 - DNA, 25 bp, Homo sapiens
gttcttacaggcaacaatgcaggat

SEQ ID NO: 27429 - DNA, 25 bp, Homo sapiens
cttacaggcaacaatgcaggatttg

SEQ ID NO: 27430 - DNA, 25 bp, Homo sapiens
tacaggcaacaatgcaggatttgga

SEQ ID NO: 27431 - DNA, 25 bp, Homo sapiens
aggcaacaatgcaggatttggaaca

SEQ ID NO: 27432 - DNA, 25 bp, Homo sapiens
gcaacaatgcaggatttggaacaga

SEQ ID NO: 27433 - DNA, 25 bp, Homo sapiens
atttggaacagaggcgtccccagtt

SEQ ID NO: 27434 - DNA, 25 bp, Homo sapiens
acaatgcaggatttggaacagaggc

SEQ ID NO: 27435 - DNA, 25 bp, Homo sapiens
cagttggaagaactcattaccgctg

SEQ ID NO: 27436 - DNA, 25 bp, Homo sapiens
gaacagaggcgtccccagttggaag

SEQ ID NO: 27437 - DNA, 25 bp, Homo sapiens
cgctgcccaaaatttgaaaaacaag

SEQ ID NO: 27438 - DNA, 25 bp, Homo sapiens
acaagaccagcaatcaagaggctag

SEQ ID NO: 27439 - DNA, 25 bp, Homo sapiens
attaccgctgcccaaaatttgaaaa

SEQ ID NO: 27440 - DNA, 25 bp, Homo sapiens
gctagaacaatcattacggatcgaa

SEQ ID NO: 27441 - DNA, 25 bp, Homo sapiens
aatttgaaaaacaagaccagcaatc

SEQ ID NO: 27442 - DNA, 25 bp, Homo sapiens
aacaatcattacggatcgaagtaag

SEQ ID NO: 27443 - DNA, 25 bp, Homo sapiens
accagcaatcaagaggctagaacaa

SEQ ID NO: 27444 - DNA, 25 bp, Homo sapiens
tcattacggatcgaagtaagttttt

SEQ ID NO: 27445 - DNA, 25 bp, Homo sapiens
acggatcgaagtaagttttttaaca

SEQ ID NO: 27446 - DNA, 25 bp, Homo sapiens
tcgaagtaagttttttaacaagcat

SEQ ID NO: 27447 - DNA, 25 bp, Homo sapiens
gtaagttttttaacaagcatgggac

SEQ ID NO: 27448 - DNA, 20 bp, Homo sapiens
tactaagggatatttgttct

SEQ ID NO: 27449 - DNA, 20 bp, Homo sapiens
taagggatatttgttcttac

SEQ ID NO: 27450 - DNA, 20 bp, Homo sapiens
gatatttgttcttacaggca

SEQ ID NO: 27451 - DNA, 20 bp, Homo sapiens
ttgttcttacaggcaacaat

SEQ ID NO: 27452 - DNA, 20 bp, Homo sapiens
cttacaggcaacaatgcagg

SEQ ID NO: 27453 - DNA, 20 bp, Homo sapiens
aggcaacaatgcaggatttg

SEQ ID NO: 27454 - DNA, 20 bp, Homo sapiens
gcaggatttggaacagaggc

SEQ ID NO: 27455 - DNA, 20 bp, Homo sapiens
gaggcgtccccagttggaag

SEQ ID NO: 27456 - DNA, 20 bp, Homo sapiens
ggaagaactcattaccgctg

SEQ ID NO: 27457 - DNA, 20 bp, Homo sapiens
cgctgcccaaaatttgaaaa

SEQ ID NO: 27458 - DNA, 20 bp, Homo sapiens
gaaaaacaagaccagcaatc

SEQ ID NO: 27459 - DNA, 20 bp, Homo sapiens
caatcaagaggctagaacaa

SEQ ID NO: 27460 - DNA, 20 bp, Homo sapiens
aacaatcattacggatcgaa

SEQ ID NO: 27461 - DNA, 20 bp, Homo sapiens
tcattacggatcgaagtaag

SEQ ID NO: 27462 - DNA, 20 bp, Homo sapiens
acggatcgaagtaagttttt

SEQ ID NO: 27463 - DNA, 20 bp, Homo sapiens
gtaagttttttaacaagcat

SEQ ID NO: 27464 - DNA, 20 bp, Homo sapiens
ttttttaacaagcatgggac

SEQ ID NO: 27465 - DNA, 25 bp, Homo sapiens
atatttatttttccttttattctag

SEQ ID NO: 27466 - DNA, 25 bp, Homo sapiens
atttatttttccttttattctagtt

SEQ ID NO: 27467 - DNA, 25 bp, Homo sapiens
tatttttccttttattctagttgaa

SEQ ID NO: 27468 - DNA, 25 bp, Homo sapiens
tttttccttttattctagttgaaag

SEQ ID NO: 27469 - DNA, 25 bp, Homo sapiens
ttccttttattctagttgaaagaat

SEQ ID NO: 27470 - DNA, 25 bp, Homo sapiens
ccttttattctagttgaaagaattc

SEQ ID NO: 27471 - DNA, 25 bp, Homo sapiens
tttattctagttgaaagaattcaga

SEQ ID NO: 27472 - DNA, 25 bp, Homo sapiens
tattctagttgaaagaattcagaat

SEQ ID NO: 27473 - DNA, 25 bp, Homo sapiens
tctagttgaaagaattcagaatcag

SEQ ID NO: 27474 - DNA, 25 bp, Homo sapiens
tagttgaaagaattcagaatcagtg

SEQ ID NO: 27475 - DNA, 25 bp, Homo sapiens
ttgaaagaattcagaatcagtggga

SEQ ID NO: 27476 - DNA, 25 bp, Homo sapiens
gaaagaattcagaatcagtgggatg

SEQ ID NO: 27477 - DNA, 25 bp, Homo sapiens
aattcagaatcagtgggatgaagta

SEQ ID NO: 27478 - DNA, 24 bp, Homo sapiens
agtacaagaacaccttcagaaccg

SEQ ID NO: 27479 - DNA, 25 bp, Homo sapiens
acaccttcagaaccggaggcaacag

SEQ ID NO: 27480 - DNA, 25 bp, Homo sapiens
aaccggaggcaacagttgaatgaaa

SEQ ID NO: 27481 - DNA, 25 bp, Homo sapiens
gaggcaacagttgaatgaaatgtta

SEQ ID NO: 27482 - DNA, 25 bp, Homo sapiens
tgaaatgttaaaggattcaacacaa

SEQ ID NO: 27483 - DNA, 25 bp, Homo sapiens
cacaatggctggaagctaaggaaga

SEQ ID NO: 27484 - DNA, 25 bp, Homo sapiens
ttcaacacaatggctggaagctaag

SEQ ID NO: 27485 - DNA, 25 bp, Homo sapiens
gaagaagctgagcaggtcttaggac

SEQ ID NO: 27486 - DNA, 25 bp, Homo sapiens
ggaagctaaggaagaagctgagcag

SEQ ID NO: 27487 - DNA, 25 bp, Homo sapiens
aggacaggccagagccaagcttgag

SEQ ID NO: 27488 - DNA, 25 bp, Homo sapiens
agctgagcaggtcttaggacaggcc

SEQ ID NO: 27489 - DNA, 25 bp, Homo sapiens
ttgagtcatggaaggagggtcccta

SEQ ID NO: 27490 - DNA, 25 bp, Homo sapiens
ccctatacagtagatgcaatccaaa

SEQ ID NO: 27491 - DNA, 25 bp, Homo sapiens
caagcttgagtcatggaaggagggt

SEQ ID NO: 27492 - DNA, 25 bp, Homo sapiens
ccaaaagaaaatcacagaaaccaag

SEQ ID NO: 27493 - DNA, 25 bp, Homo sapiens
gaaggagggtccctatacagtagat

SEQ ID NO: 27494 - DNA, 25 bp, Homo sapiens
tacagtagatgcaatccaaaagaaa

SEQ ID NO: 27495 - DNA, 25 bp, Homo sapiens
atcacagaaaccaaggttagtatca

SEQ ID NO: 27496 - DNA, 25 bp, Homo sapiens
agaaaccaaggttagtatcaaagat

SEQ ID NO: 27497 - DNA, 25 bp, Homo sapiens
ccaaggttagtatcaaagatacctt

SEQ ID NO: 27498 - DNA, 25 bp, Homo sapiens
gttagtatcaaagatacctttttaa

SEQ ID NO: 27499 - DNA, 20 bp, Homo sapiens
atatttatttttccttttat

SEQ ID NO: 27500 - DNA, 20 bp, Homo sapiens
atttatttttccttttattc

SEQ ID NO: 27501 - DNA, 20 bp, Homo sapiens
tttttccttttattctagtt

SEQ ID NO: 27502 - DNA, 20 bp, Homo sapiens
ccttttattctagttgaaag

SEQ ID NO: 27503 - DNA, 20 bp, Homo sapiens
tattctagttgaaagaattc

SEQ ID NO: 27504 - DNA, 20 bp, Homo sapiens
tagttgaaagaattcagaat

SEQ ID NO: 27505 - DNA, 20 bp, Homo sapiens
agaatcagtgggatgaagta

SEQ ID NO: 27506 - DNA, 19 bp, Homo sapiens
agtacaagaacaccttcag

SEQ ID NO: 27507 - DNA, 20 bp, Homo sapiens
ttcagaaccggaggcaacag

SEQ ID NO: 27508 - DNA, 20 bp, Homo sapiens
aacagttgaatgaaatgtta

SEQ ID NO: 27509 - DNA, 20 bp, Homo sapiens
tgttaaaggattcaacacaa

SEQ ID NO: 27510 - DNA, 20 bp, Homo sapiens
cacaatggctggaagctaag

SEQ ID NO: 27511 - DNA, 20 bp, Homo sapiens
ctaaggaagaagctgagcag

SEQ ID NO: 27512 - DNA, 20 bp, Homo sapiens
agcaggtcttaggacaggcc

SEQ ID NO: 27513 - DNA, 20 bp, Homo sapiens
aggccagagccaagcttgag

SEQ ID NO: 27514 - DNA, 20 bp, Homo sapiens
ttgagtcatggaaggagggt

SEQ ID NO: 27515 - DNA, 20 bp, Homo sapiens
agggtccctatacagtagat

SEQ ID NO: 27516 - DNA, 20 bp, Homo sapiens
tagatgcaatccaaaagaaa

SEQ ID NO: 27517 - DNA, 20 bp, Homo sapiens
agaaaatcacagaaaccaag

SEQ ID NO: 27518 - DNA, 20 bp, Homo sapiens
atcacagaaaccaaggttag

SEQ ID NO: 27519 - DNA, 20 bp, Homo sapiens
agaaaccaaggttagtatca

SEQ ID NO: 27520 - DNA, 20 bp, Homo sapiens
ccaaggttagtatcaaagat

SEQ ID NO: 27521 - DNA, 20 bp, Homo sapiens
gttagtatcaaagatacctt

SEQ ID NO: 27522 - DNA, 20 bp, Homo sapiens
tatcaaagatacctttttaa

SEQ ID NO: 27523 - DNA, 24 bp, Homo sapiens
tctctttctcataaaaatctatag

SEQ ID NO: 27524 - DNA, 25 bp, Homo sapiens
tttctcataaaaatctatagcagtt

SEQ ID NO: 27525 - DNA, 25 bp, Homo sapiens
cataaaaatctatagcagttggcca

SEQ ID NO: 27526 - DNA, 25 bp, Homo sapiens
aaatctatagcagttggccaaagac

SEQ ID NO: 27527 - DNA, 25 bp, Homo sapiens
tatagcagttggccaaagacctccg

SEQ ID NO: 27528 - DNA, 25 bp, Homo sapiens
cagttggccaaagacctccgccagt

SEQ ID NO: 27529 - DNA, 25 bp, Homo sapiens
aagacctccgccagtggcagacaaa

SEQ ID NO: 27530 - DNA, 25 bp, Homo sapiens
acaaatgtagatgtggcaaatgact

SEQ ID NO: 27531 - DNA, 25 bp, Homo sapiens
ggcagacaaatgtagatgtggcaaa

SEQ ID NO: 27532 - DNA, 25 bp, Homo sapiens
tgacttggccctgaaacttctccgg

SEQ ID NO: 27533 - DNA, 25 bp, Homo sapiens
tccgggattattctgcagatgatac

SEQ ID NO: 27534 - DNA, 25 bp, Homo sapiens
tggccctgaaacttctccgggatta

SEQ ID NO: 27535 - DNA, 25 bp, Homo sapiens
gataccagaaaagtccacatgataa

SEQ ID NO: 27536 - DNA, 25 bp, Homo sapiens
gataacagagaatatcaatgcctct

SEQ ID NO: 27537 - DNA, 25 bp, Homo sapiens
cagatgataccagaaaagtccacat

SEQ ID NO: 27538 - DNA, 25 bp, Homo sapiens
cctcttggagaagcattcataaaag

SEQ ID NO: 27539 - DNA, 25 bp, Homo sapiens
aagtccacatgataacagagaatat

SEQ ID NO: 27540 - DNA, 25 bp, Homo sapiens
tggagaagcattcataaaaggtatg

SEQ ID NO: 27541 - DNA, 25 bp, Homo sapiens
cagagaatatcaatgcctcttggag

SEQ ID NO: 27542 - DNA, 25 bp, Homo sapiens
aagcattcataaaaggtatgaatta

SEQ ID NO: 27543 - DNA, 25 bp, Homo sapiens
ttcataaaaggtatgaattacatta

SEQ ID NO: 27544 - DNA, 25 bp, Homo sapiens
aaaaggtatgaattacattatttct

SEQ ID NO: 27545 - DNA, 25 bp, Homo sapiens
gtatgaattacattatttctaaaac

SEQ ID NO: 27546 - DNA, 19 bp, Homo sapiens
tctctttctcataaaaatc

SEQ ID NO: 27547 - DNA, 20 bp, Homo sapiens
tttctcataaaaatctatag

SEQ ID NO: 27548 - DNA, 20 bp, Homo sapiens
cataaaaatctatagcagtt

SEQ ID NO: 27549 - DNA, 20 bp, Homo sapiens
aaatctatagcagttggcca

SEQ ID NO: 27550 - DNA, 20 bp, Homo sapiens
tatagcagttggccaaagac

SEQ ID NO: 27551 - DNA, 20 bp, Homo sapiens
cagttggccaaagacctccg

SEQ ID NO: 27552 - DNA, 20 bp, Homo sapiens
ctccgccagtggcagacaaa

SEQ ID NO: 27553 - DNA, 20 bp, Homo sapiens
acaaatgtagatgtggcaaa

SEQ ID NO: 27554 - DNA, 20 bp, Homo sapiens
gcaaatgacttggccctgaa

SEQ ID NO: 27555 - DNA, 20 bp, Homo sapiens
ctgaaacttctccgggatta

SEQ ID NO: 27556 - DNA, 20 bp, Homo sapiens
gattattctgcagatgatac

SEQ ID NO: 27557 - DNA, 20 bp, Homo sapiens
gataccagaaaagtccacat

SEQ ID NO: 27558 - DNA, 20 bp, Homo sapiens
cacatgataacagagaatat

SEQ ID NO: 27559 - DNA, 20 bp, Homo sapiens
aatatcaatgcctcttggag

SEQ ID NO: 27560 - DNA, 20 bp, Homo sapiens
tggagaagcattcataaaag

SEQ ID NO: 27561 - DNA, 20 bp, Homo sapiens
aagcattcataaaaggtatg

SEQ ID NO: 27562 - DNA, 20 bp, Homo sapiens
ttcataaaaggtatgaatta

SEQ ID NO: 27563 - DNA, 20 bp, Homo sapiens
aaaaggtatgaattacatta

SEQ ID NO: 27564 - DNA, 20 bp, Homo sapiens
gtatgaattacattatttct

SEQ ID NO: 27565 - DNA, 20 bp, Homo sapiens
aattacattatttctaaaac

SEQ ID NO: 27566 - DNA, 25 bp, Homo sapiens
catctgaacatttggtcctttgcag

SEQ ID NO: 27567 - DNA, 25 bp, Homo sapiens
gaacatttggtcctttgcagggtga

SEQ ID NO: 27568 - DNA, 25 bp, Homo sapiens
tttggtcctttgcagggtgagtgag

SEQ ID NO: 27569 - DNA, 25 bp, Homo sapiens
tcctttgcagggtgagtgagcgaga

SEQ ID NO: 27570 - DNA, 25 bp, Homo sapiens
tgcagggtgagtgagcgagaggctg

SEQ ID NO: 27571 - DNA, 25 bp, Homo sapiens
ggtgagtgagcgagaggctgctttg

SEQ ID NO: 27572 - DNA, 25 bp, Homo sapiens
gtgagcgagaggctgctttggaaga

SEQ ID NO: 27573 - DNA, 25 bp, Homo sapiens
ggctgctttggaagaaactcataga

SEQ ID NO: 27574 - DNA, 25 bp, Homo sapiens
gaagaaactcatagattactgcaac

SEQ ID NO: 27575 - DNA, 25 bp, Homo sapiens
aactcatagattactgcaacagttc

SEQ ID NO: 27576 - DNA, 25 bp, Homo sapiens
gcaacagttccccctggacctggaa

SEQ ID NO: 27577 - DNA, 25 bp, Homo sapiens
tggaaaagtttcttgcctggcttac

SEQ ID NO: 27578 - DNA, 25 bp, Homo sapiens
ggacctggaaaagtttcttgcctgg

SEQ ID NO: 27579 - DNA, 25 bp, Homo sapiens
cttacagaagctgaaacaactgcca

SEQ ID NO: 27580 - DNA, 25 bp, Homo sapiens
tcttgcctggcttacagaagctgaa

SEQ ID NO: 27581 - DNA, 25 bp, Homo sapiens
tgccaatgtcctacaggatgctacc

SEQ ID NO: 27582 - DNA, 25 bp, Homo sapiens
agaagctgaaacaactgccaatgtc

SEQ ID NO: 27583 - DNA, 25 bp, Homo sapiens
ctacccgtaaggaaaggctcctaga

SEQ ID NO: 27584 - DNA, 25 bp, Homo sapiens
ctagaagactccaagggagtaaaag

SEQ ID NO: 27585 - DNA, 25 bp, Homo sapiens
ggatgctacccgtaaggaaaggctc

SEQ ID NO: 27586 - DNA, 25 bp, Homo sapiens
aaaagagctgatgaaacaatggcaa

SEQ ID NO: 27587 - DNA, 25 bp, Homo sapiens
ggaaaggctcctagaagactccaag

SEQ ID NO: 27588 - DNA, 25 bp, Homo sapiens
agctgatgaaacaatggcaagtaag

SEQ ID NO: 27589 - DNA, 25 bp, Homo sapiens
agactccaagggagtaaaagagctg

SEQ ID NO: 27590 - DNA, 25 bp, Homo sapiens
atgaaacaatggcaagtaagtcagg

SEQ ID NO: 27591 - DNA, 25 bp, Homo sapiens
acaatggcaagtaagtcaggcattt

SEQ ID NO: 27592 - DNA, 25 bp, Homo sapiens
ggcaagtaagtcaggcatttccgct

SEQ ID NO: 27593 - DNA, 25 bp, Homo sapiens
gtaagtcaggcatttccgctttagc

SEQ ID NO: 27594 - DNA, 20 bp, Homo sapiens
catctgaacatttggtcctt

SEQ ID NO: 27595 - DNA, 20 bp, Homo sapiens
gaacatttggtcctttgcag

SEQ ID NO: 27596 - DNA, 20 bp, Homo sapiens
tttggtcctttgcagggtga

SEQ ID NO: 27597 - DNA, 20 bp, Homo sapiens
tcctttgcagggtgagtgag

SEQ ID NO: 27598 - DNA, 20 bp, Homo sapiens
tgcagggtgagtgagcgaga

SEQ ID NO: 27599 - DNA, 20 bp, Homo sapiens
ggtgagtgagcgagaggctg

SEQ ID NO: 27600 - DNA, 20 bp, Homo sapiens
gtgagcgagaggctgctttg

SEQ ID NO: 27601 - DNA, 20 bp, Homo sapiens
ctttggaagaaactcataga

SEQ ID NO: 27602 - DNA, 20 bp, Homo sapiens
atagattactgcaacagttc

SEQ ID NO: 27603 - DNA, 20 bp, Homo sapiens
agttccccctggacctggaa

SEQ ID NO: 27604 - DNA, 20 bp, Homo sapiens
tggaaaagtttcttgcctgg

SEQ ID NO: 27605 - DNA, 20 bp, Homo sapiens
cctggcttacagaagctgaa

SEQ ID NO: 27606 - DNA, 20 bp, Homo sapiens
ctgaaacaactgccaatgtc

SEQ ID NO: 27607 - DNA, 20 bp, Homo sapiens
atgtcctacaggatgctacc

SEQ ID NO: 27608 - DNA, 20 bp, Homo sapiens
ctacccgtaaggaaaggctc

SEQ ID NO: 27609 - DNA, 20 bp, Homo sapiens
ggctcctagaagactccaag

SEQ ID NO: 27610 - DNA, 20 bp, Homo sapiens
ccaagggagtaaaagagctg

SEQ ID NO: 27611 - DNA, 20 bp, Homo sapiens
agctgatgaaacaatggcaa

SEQ ID NO: 27612 - DNA, 20 bp, Homo sapiens
atgaaacaatggcaagtaag

SEQ ID NO: 27613 - DNA, 20 bp, Homo sapiens
acaatggcaagtaagtcagg

SEQ ID NO: 27614 - DNA, 20 bp, Homo sapiens
ggcaagtaagtcaggcattt

SEQ ID NO: 27615 - DNA, 20 bp, Homo sapiens
gtaagtcaggcatttccgct

SEQ ID NO: 27616 - DNA, 20 bp, Homo sapiens
tcaggcatttccgctttagc

SEQ ID NO: 27617 - DNA, 21 bp, Homo sapiens
cacrgagggtgatggtgggtg

SEQ ID NO: 27618 - DNA, 20 bp, Homo sapiens
agaaatgccatcttccttga

SEQ ID NO: 27619 - DNA, 23 bp, Homo sapiens
atcaagttataaaatcacagagg

SEQ ID NO: 27620 - DNA, 17 bp, Homo sapiens
ccaaactagaaatgcca

SEQ ID NO: 27621 - DNA, 23 bp, Homo sapiens
gatgttggaggtacctgctctgg

SEQ ID NO: 27622 - DNA, 24 bp, Homo sapiens
tcagtggctaacagaagctgaaca

SEQ ID NO: 27623 - DNA, 19 bp, Homo sapiens
ctgttgagaaatggcggcg

SEQ ID NO: 27624 - DNA, 19 bp, Homo sapiens
ggggaagaaataattcagc

SEQ ID NO: 27625 - DNA, 17 bp, Homo sapiens
ccaggatggcattgggc

SEQ ID NO: 27626 - DNA, 18 bp, Homo sapiens
cagaaccggaggcaacag

SEQ ID NO: 27627 - DNA, 30 bp, Homo sapiens
tttggtatcttacaggaactccaggatggc

SEQ ID NO: 27628 - DNA, 30 bp, Homo sapiens
tatcttacaggaactccaggatggcattgg

SEQ ID NO: 27629 - DNA, 30 bp, Homo sapiens
aggaactccaggatggcattgggcagcggc

SEQ ID NO: 27630 - DNA, 30 bp, Homo sapiens
actccaggatggcattgggcagcggcaaac

SEQ ID NO: 27631 - DNA, 30 bp, Homo sapiens
aggatggcattgggcagcggcaaactgttg

SEQ ID NO: 27632 - DNA, 30 bp, Homo sapiens
tggcattgggcagcggcaaactgttgtcag

SEQ ID NO: 27633 - DNA, 30 bp, Homo sapiens
attgggcagcggcaaactgttgtcagaaca

SEQ ID NO: 27634 - DNA, 30 bp, Homo sapiens
gggcagcggcaaactgttgtcagaacattg

SEQ ID NO: 27635 - DNA, 30 bp, Homo sapiens
agcggcaaactgttgtcagaacattgaatg

SEQ ID NO: 27636 - DNA, 30 bp, Homo sapiens
agaacattgaatgcaactggggaagaaata

SEQ ID NO: 27637 - DNA, 30 bp, Homo sapiens
tgaatgcaactggggaagaaataattcagc

SEQ ID NO: 27638 - DNA, 30 bp, Homo sapiens
gcaactggggaagaaataattcagcaatcc

SEQ ID NO: 27639 - DNA, 30 bp, Homo sapiens
tggggaagaaataattcagcaatcctcaaa

SEQ ID NO: 27640 - DNA, 30 bp, Homo sapiens
aaagaattcagaatcagtgggatgaagtac

SEQ ID NO: 27641 - DNA, 30 bp, Homo sapiens
aattcagaatcagtgggatgaagtacaaga

SEQ ID NO: 27642 - DNA, 30 bp, Homo sapiens
tcagaatcagtgggatgaagtacaagaaca

SEQ ID NO: 27643 - DNA, 30 bp, Homo sapiens
ggatgaagtacaagaacaccttcagaaccg

SEQ ID NO: 27644 - DNA, 30 bp, Homo sapiens
tgaagtacaagaacaccttcagaaccggag

SEQ ID NO: 27645 - DNA, 30 bp, Homo sapiens
agtacaagaacaccttcagaaccggaggca

SEQ ID NO: 27646 - DNA, 30 bp, Homo sapiens; identical to SEQ ID NO: 11262

SEQ ID NO: 27647 - DNA, 30 bp, Homo sapiens
agaacaccttcagaaccggaggcaacagtt

SEQ ID NO: 27648 - DNA, 30 bp, Homo sapiens
acaccttcagaaccggaggcaacagttgaa

SEQ ID NO: 27649 - DNA, 19 bp, Homo sapiens
ctccccttctccccacccc

SEQ ID NO: 27650 - DNA, 19 bp, Homo sapiens
ggggagaaggggaggagga

SEQ ID NO: 27651 - DNA, 19 bp, Homo sapiens
gctgctgctgctgctgcta

SEQ ID NO: 27652 - DNA, 28 bp, Homo sapiens
gcgatttgacagatctgttgagaaatgg

SEQ ID NO: 27653 - DNA, 28 bp, Homo sapiens
gtggcaaatgacttggccctgaaacttc

SEQ ID NO: 27654 - DNA, 28 bp, Homo sapiens
gatggcattgggcagcggcaaactgttg

SEQ ID NO: 27655 - DNA, 28 bp, Homo sapiens
ggtgagtgagcgagaggctgctttggaa

SEQ ID NO: 27656 - DNA, 20 bp, Homo sapiens
ccacatgtaggtcaaaaatg

SEQ ID NO: 27657 - DNA, 20 bp, Homo sapiens
ctttccacatgtaggtcaaa

SEQ ID NO: 27658 - DNA, 26 bp, Homo sapiens
ctttccacatgtaggtcaaaaatgta

SEQ ID NO: 27659 - DNA, 23 bp, Homo sapiens
ctgggtccgacaatcaactcgta

SEQ ID NO: 27660 - DNA, 30 bp, Homo sapiens
gatgttcaaaagaaaacattcacaaaatgg

SEQ ID NO: 27661 - DNA, 24 bp, Homo sapiens
aaaagaaaacattcacaaaatggg

SEQ ID NO: 27662 - DNA, 22 bp, Homo sapiens
cacaaaatgggtaaatgcacaa

SEQ ID NO: 27663 - DNA, 24 bp, Homo sapiens
aaaatgggtaaatgcacaattttc

SEQ ID NO: 27664 - DNA, 21 bp, Homo sapiens
agaacctcttcagtgacctac

SEQ ID NO: 27665 - DNA, 31 bp, Homo sapiens
actgacatcgtagatggaaatcataaactga

SEQ ID NO: 27666 - DNA, 19 bp, Homo sapiens
attgaagccatccaggaag

SEQ ID NO: 27667 - DNA, 19 bp, Homo sapiens
gaagtccatcttaatgtac

SEQ ID NO: 27668 - DNA, 29 bp, Homo sapiens
ctgcagatcacggtcagtctagcacaggg

SEQ ID NO: 27669 - DNA, 30 bp, Homo sapiens
gatggacagaagaccgctgggttcttttac

SEQ ID NO: 27670 - DNA, 25 bp, Homo sapiens
cggatctagaaaagaaaaagcaatc

SEQ ID NO: 27671 - DNA, 23 bp, Homo sapiens
ctcacagatttcacaggctgtca

SEQ ID NO: 27672 - DNA, 20 bp, Homo sapiens
aacacagacaactgtaatgg

SEQ ID NO: 27673 - DNA, 20 bp, Homo sapiens
ccaaaagaagaggcagatta

SEQ ID NO: 27674 - DNA, 30 bp, Homo sapiens
ttcacagctggattactcgctcagaagctg

SEQ ID NO: 27675 - DNA, 16 bp, Homo sapiens
gcaagatgccagcaga

SEQ ID NO: 27676 - DNA, 25 bp, Homo sapiens
caaacaagcctcagaacaactgaac

SEQ ID NO: 27677 - DNA, 25 bp, Homo sapiens
acaattggagcagatgacaactact

SEQ ID NO: 27678 - DNA, 20 bp, Homo sapiens
aattgcaggtctgtgaatat

SEQ ID NO: 27679 - DNA, 25 bp, Homo sapiens
aattcaggtaattcaagattttact

SEQ ID NO: 27680 - DNA, 30 bp, Homo sapiens
gtcgaagaaagcgccctctgaaattagccg

SEQ ID NO: 27681 - DNA, 25 bp, Homo sapiens
ctgaagaaatggatggctgaagttg

SEQ ID NO: 27682 - DNA, 23 bp, Homo sapiens
gaaggaggaatggcctgcccttg

SEQ ID NO: 27683 - DNA, 25 bp, Homo sapiens
ttcagaaattctaaaaaagcagctg

SEQ ID NO: 27684 - DNA, 25 bp, Homo sapiens
cttcgagacttgagacagaactcaa

SEQ ID NO: 27685 - DNA, 20 bp, Homo sapiens
gatgcgacattcagaggata

SEQ ID NO: 27686 - DNA, 20 bp, Homo sapiens
gcgacattcagaggataacc

SEQ ID NO: 27687 - DNA, 20 bp, Homo sapiens
gattcgcatattggcacaga

SEQ ID NO: 27688 - DNA, 19 bp, Homo sapiens
cacagaccctaacagatgg

SEQ ID NO: 27689 - DNA, 18 bp, Homo sapiens
ggaacttgagacatttaa

SEQ ID NO: 27690 - DNA, 16 bp, Homo sapiens
cgttggagggaactac

SEQ ID NO: 27691 - DNA, 15 bp, Homo sapiens
ggagggaactacatg

SEQ ID NO: 27692 - DNA, 30 bp, Homo sapiens
aaccagccaattttgagcagcgtctacaag

SEQ ID NO: 27693 - DNA, 26 bp, Homo sapiens
tacagatatggaattgacaaagagat

SEQ ID NO: 27694 - DNA, 30 bp, Homo sapiens
acagaaggtgcacctgaagagtatcacaga

SEQ ID NO: 27695 - DNA, 30 bp, Homo sapiens
acttttgaccagaatgtggaccacatcaca

SEQ ID NO: 27696 - DNA, 30 bp, Homo sapiens
gaatcacagatgagagaaagcgagaggaaa

SEQ ID NO: 27697 - DNA, 19 bp, Homo sapiens
caaagaagaaaaaaggctc

SEQ ID NO: 27698 - DNA, 19 bp, Homo sapiens
gagcccagagatgaaagga

SEQ ID NO: 27699 - DNA, 26 bp, Homo sapiens
cagtgcgtaggcaagctgagggcttg

SEQ ID NO: 27700 - DNA, 19 bp, Homo sapiens
gcagaagaagaaagaggag

SEQ ID NO: 27701 - DNA, 20 bp, Homo sapiens
aaatttgctcagtttcgaag

SEQ ID NO: 27702 - DNA, 17 bp, Homo sapiens
cactcatgtctcacaag

SEQ ID NO: 27703 - DNA, 18 bp, Homo sapiens
aagcaagaggagtctctg

SEQ ID NO: 27704 - DNA, 18 bp, Homo sapiens
agcaagaagacagcagca

SEQ ID NO: 27705 - DNA, 19 bp, Homo sapiens
ggaaagggtgaagctacag

SEQ ID NO: 27706 - DNA, 20 bp, Homo sapiens
ccaatgggaaaaagttaaca

SEQ ID NO: 27707 - DNA, 20 bp, Homo sapiens
gggaaaaagttaacaaaatg

SEQ ID NO: 27708 - DNA, 30 bp, Homo sapiens
gcgatttgacagatctgttgagaaatggcg

SEQ ID NO: 27709 - DNA, 30 bp, Homo sapiens
cgatttgacagatctgttgagaaatggcgg

SEQ ID NO: 27710 - DNA, 30 bp, Homo sapiens
gatttgacagatctgttgagaaatggcggc

SEQ ID NO: 27711 - DNA, 30 bp, Homo sapiens
atttgacagatctgttgagaaatggcggct

SEQ ID NO: 27712 - DNA, 30 bp, Homo sapiens
gacagatctgttgagaaatggcggcgtttt

SEQ ID NO: 27713 - DNA, 30 bp, Homo sapiens
acagatctgttgagaaatggcggcgttttc

SEQ ID NO: 27714 - DNA, 30 bp, Homo sapiens
cagatctgttgagaaatggcggcgttttca

SEQ ID NO: 27715 - DNA, 30 bp, Homo sapiens
agatctgttgagaaatggcggcgttttcat

SEQ ID NO: 27716 - DNA, 30 bp, Homo sapiens
ctgttgagaaatggcggcgttttcattatg

SEQ ID NO: 27717 - DNA, 30 bp, Homo sapiens
tgagaaatggcggcgttttcattatgatat

SEQ ID NO: 27718 - DNA, 30 bp, Homo sapiens
gagaaatggcggcgttttcattatgatata

SEQ ID NO: 27719 - DNA, 30 bp, Homo sapiens
atttaatcagtggctaacagaagctgaaca

SEQ ID NO: 27720 - DNA, 30 bp, Homo sapiens
ttaatcagtggctaacagaagctgaacagt

SEQ ID NO: 27721 - DNA, 30 bp, Homo sapiens
atcagtggctaacagaagctgaacagtttc

SEQ ID NO: 27722 - DNA, 30 bp, Homo sapiens
aacagaagctgaacagtttctcagaaagac

SEQ ID NO: 27723 - DNA, 20 bp, Homo sapiens
gggaacatgctaaatacaaa

SEQ ID NO: 27724 - DNA, 30 bp, Homo sapiens
gaactccaggatggcattgggcagcggcaa

SEQ ID NO: 27725 - DNA, 30 bp, Homo sapiens
aactccaggatggcattgggcagcggcaaa

SEQ ID NO: 27726 - DNA, 30 bp, Homo sapiens
ctccaggatggcattgggcagcggcaaact

SEQ ID NO: 27727 - DNA, 30 bp, Homo sapiens
tccaggatggcattgggcagcggcaaactg

SEQ ID NO: 27728 - DNA, 30 bp, Homo sapiens
ggatggcattgggcagcggcaaactgttgt

SEQ ID NO: 27729 - DNA, 30 bp, Homo sapiens
gatggcattgggcagcggcaaactgttgtc

SEQ ID NO: 27730 - DNA, 30 bp, Homo sapiens
atggcattgggcagcggcaaactgttgtca

SEQ ID NO: 27731 - DNA, 30 bp, Homo sapiens
ggcattgggcagcggcaaactgttgtcaga

SEQ ID NO: 27732 - DNA, 18 bp, Homo sapiens
gcaatcctcaaaaacaga

SEQ ID NO: 27733 - DNA, 17 bp, Homo sapiens
gcctgaatctgcggtgg

SEQ ID NO: 27734 - DNA, 17 bp, Homo sapiens
ggcaggaggtctgcaaa

SEQ ID NO: 27735 - DNA, 19 bp, Homo sapiens
cagctgtcagacagaaaaa

SEQ ID NO: 27736 - DNA, 16 bp, Homo sapiens
aagaatatcttgtcag

SEQ ID NO: 27737 - DNA, 21 bp, Homo sapiens
agaatatcttgtcagaatttc

SEQ ID NO: 27738 - DNA, 30 bp, Homo sapiens
taaatgaatttgttttatggttggaggaag

SEQ ID NO: 27739 - DNA, 30 bp, Homo sapiens
aaatgaatttgttttatggttggaggaagc

SEQ ID NO: 27740 - DNA, 30 bp, Homo sapiens
aatgaatttgttttatggttggaggaagca

SEQ ID NO: 27741 - DNA, 15 bp, Homo sapiens
aatgaatttgtttta

SEQ ID NO: 27742 - DNA, 30 bp, Homo sapiens
atgaatttgttttatggttggaggaagcag

SEQ ID NO: 27743 - DNA, 30 bp, Homo sapiens
tgaatttgttttatggttggaggaagcaga

SEQ ID NO: 27744 - DNA, 30 bp, Homo sapiens
gaatttgttttatggttggaggaagcagat

SEQ ID NO: 27745 - DNA, 30 bp, Homo sapiens
aatttgttttatggttggaggaagcagata

SEQ ID NO: 27746 - DNA, 30 bp, Homo sapiens
atttgttttatggttggaggaagcagataa

SEQ ID NO: 27747 - DNA, 30 bp, Homo sapiens
tttgttttatggttggaggaagcagataac

SEQ ID NO: 27748 - DNA, 30 bp, Homo sapiens
ttgttttatggttggaggaagcagataaca

SEQ ID NO: 27749 - DNA, 30 bp, Homo sapiens
tgttttatggttggaggaagcagataacat

SEQ ID NO: 27750 - DNA, 30 bp, Homo sapiens
gttttatggttggaggaagcagataacatt

SEQ ID NO: 27751 - DNA, 30 bp, Homo sapiens
ttttatggttggaggaagcagataacattg

SEQ ID NO: 27752 - DNA, 30 bp, Homo sapiens
tttatggttggaggaagcagataacattgc

SEQ ID NO: 27753 - DNA, 30 bp, Homo sapiens
ttatggttggaggaagcagataacattgct

SEQ ID NO: 27754 - DNA, 30 bp, Homo sapiens
tatggttggaggaagcagataacattgcta

SEQ ID NO: 27755 - DNA, 30 bp, Homo sapiens
atggttggaggaagcagataacattgctag

SEQ ID NO: 27756 - DNA, 30 bp, Homo sapiens
tggttggaggaagcagataacattgctagt

SEQ ID NO: 27757 - DNA, 20 bp, Homo sapiens
ggttggaggaagcagataac

SEQ ID NO: 27758 - DNA, 19 bp, Homo sapiens
tagtatcccacttgaacct

SEQ ID NO: 27759 - DNA, 15 bp, Homo sapiens
cacttgaacctggaa

SEQ ID NO: 27760 - DNA, 15 bp, Homo sapiens
aagagcagcaactaa

SEQ ID NO: 27761 - DNA, 20 bp, Homo sapiens
gcagcaactaaaagaaaagc

SEQ ID NO: 27762 - DNA, 17 bp, Homo sapiens
ctaaaagaaaagcttga

SEQ ID NO: 27763 - DNA, 30 bp, Homo sapiens
tttcagttactggtggaagagttgcccctg

SEQ ID NO: 27764 - DNA, 22 bp, Homo sapiens
caaacaattaaatgaaactgga

SEQ ID NO: 27765 - DNA, 19 bp, Homo sapiens
acccgtgcttgtaagtgct

SEQ ID NO: 27766 - DNA, 18 bp, Homo sapiens
aagcccagaagagcaaga

SEQ ID NO: 27767 - DNA, 21 bp, Homo sapiens
gaagagcaagataaacttgaa

SEQ ID NO: 27768 - DNA, 21 bp, Homo sapiens
aaacttgaaaataagctcaag

SEQ ID NO: 27769 - DNA, 23 bp, Homo sapiens
aacttgaaaataagctcaagcag

SEQ ID NO: 27770 - DNA, 30 bp, Homo sapiens
ctttcaggtttccagagctttacctgagaa

SEQ ID NO: 27771 - DNA, 21 bp, Homo sapiens
agcttgaaaaaaagcttgaag

SEQ ID NO: 27772 - DNA, 16 bp, Homo sapiens
gagaaacaaggagaaa

SEQ ID NO: 27773 - DNA, 19 bp, Homo sapiens
aacaaggagaaattgaagc

SEQ ID NO: 27774 - DNA, 19 bp, Homo sapiens
aaattgaagctcaaataaa

SEQ ID NO: 27775 - DNA, 19 bp, Homo sapiens
gaagctcaaataaaagacc

SEQ ID NO: 27776 - DNA, 17 bp, Homo sapiens
aaaagaccttgggcagc

SEQ ID NO: 27777 - DNA, 21 bp, Homo sapiens
aaaagcttgaagaccttgaag

SEQ ID NO: 27778 - DNA, 21 bp, Homo sapiens
gaagaccttgaagagcagtta

SEQ ID NO: 27779 - DNA, 21 bp, Homo sapiens
gaatcagttggaaatttataa

SEQ ID NO: 27780 - DNA, 27 bp, Homo sapiens
cttttccccaggaaactgaaatagcag

SEQ ID NO: 27781 - DNA, 19 bp, Homo sapiens
aaacaaccggatgtggaag

SEQ ID NO: 27782 - DNA, 19 bp, Homo sapiens
acaaggaaaaaccagccac

SEQ ID NO: 27783 - DNA, 17 bp, Homo sapiens
aagatctgagctctgag

SEQ ID NO: 27784 - DNA, 15 bp, Homo sapiens
gagggcaaagcagcc

SEQ ID NO: 27785 - DNA, 30 bp, Homo sapiens
ctcctactcagactgttactctggtgacac

SEQ ID NO: 27786 - DNA, 30 bp, Homo sapiens
actcagactgttactctggtgacacaacct

SEQ ID NO: 27787 - DNA, 30 bp, Homo sapiens
agactgttactctggtgacacaacctgtgg

SEQ ID NO: 27788 - DNA, 30 bp, Homo sapiens
acacaacctgtggttactaaggaaactgcc

SEQ ID NO: 27789 - DNA, 30 bp, Homo sapiens
aacctgtggttactaaggaaactgccatct

SEQ ID NO: 27790 - DNA, 30 bp, Homo sapiens
aaactgccatctccaaactagaaatgccat

SEQ ID NO: 27791 - DNA, 20 bp, Homo sapiens
gaacttaccgactggctttc

SEQ ID NO: 27792 - DNA, 30 bp, Homo sapiens
actggctttctctgcttgatcaagttataa

SEQ ID NO: 27793 - DNA, 15 bp, Homo sapiens
gggtgatggtgggtg

SEQ ID NO: 27794 - DNA, 20 bp, Homo sapiens
gggtgaccttgaggatatca

SEQ ID NO: 27795 - DNA, 30 bp, Homo sapiens
tcaacgagatgatcatcaagcagaaggtat

SEQ ID NO: 27796 - DNA, 25 bp, Homo sapiens
tggaacagaggcgtccccagttgga

SEQ ID NO: 27797 - DNA, 25 bp, Homo sapiens
ggaacagaggcgtccccagttggaa

SEQ ID NO: 27798 - DNA, 30 bp, Homo sapiens
aggcgtccccagttggaagaactcattacc

SEQ ID NO: 27799 - DNA, 30 bp, Homo sapiens
agaactcattaccgctgcccaaaatttgaa

SEQ ID NO: 27800 - DNA, 18 bp, Homo sapiens
gaaaaacaagaccagcaa

SEQ ID NO: 27801 - DNA, 16 bp, Homo sapiens
agaacaatcattacgg

SEQ ID NO: 27802 - DNA, 30 bp, Homo sapiens
tgaaagaattcagaatcagtgggatgaagt

SEQ ID NO: 27803 - DNA, 30 bp, Homo sapiens
gaaagaattcagaatcagtgggatgaagta

SEQ ID NO: 27804 - DNA, 30 bp, Homo sapiens
aagaattcagaatcagtgggatgaagtaca

SEQ ID NO: 27805 - DNA, 30 bp, Homo sapiens
ccaaggttagtatcaaagatacctttttaa

SEQ ID NO: 27806 - DNA, 30 bp, Homo sapiens
agaattcagaatcagtgggatgaagtacaa

SEQ ID NO: 27807 - DNA, 30 bp, Homo sapiens
gaattcagaatcagtgggatgaagtacaag

SEQ ID NO: 27808 - DNA, 30 bp, Homo sapiens
attcagaatcagtgggatgaagtacaagaa

SEQ ID NO: 27809 - DNA, 30 bp, Homo sapiens
ttcagaatcagtgggatgaagtacaagaac

SEQ ID NO: 27810 - DNA, 30 bp, Homo sapiens
cagaatcagtgggatgaagtacaagaacac

SEQ ID NO: 27811 - DNA, 30 bp, Homo sapiens
agaatcagtgggatgaagtacaagaacacc

SEQ ID NO: 27812 - DNA, 30 bp, Homo sapiens
gaatcagtgggatgaagtacaagaacacct

SEQ ID NO: 27813 - DNA, 30 bp, Homo sapiens
aatcagtgggatgaagtacaagaacacctt

SEQ ID NO: 27814 - DNA, 30 bp, Homo sapiens
atcagtgggatgaagtacaagaacaccttc

SEQ ID NO: 27815 - DNA, 30 bp, Homo sapiens
tcagtgggatgaagtacaagaacaccttca

SEQ ID NO: 27816 - DNA, 30 bp, Homo sapiens
cagtgggatgaagtacaagaacaccttcag

SEQ ID NO: 27817 - DNA, 30 bp, Homo sapiens
agtgggatgaagtacaagaacaccttcaga

SEQ ID NO: 27818 - DNA, 30 bp, Homo sapiens
gtgggatgaagtacaagaacaccttcagaa

SEQ ID NO: 27819 - DNA, 30 bp, Homo sapiens
tgggatgaagtacaagaacaccttcagaac

SEQ ID NO: 27820 - DNA, 30 bp, Homo sapiens
gggatgaagtacaagaacaccttcagaacc

SEQ ID NO: 27821 - DNA, 30 bp, Homo sapiens
gatgaagtacaagaacaccttcagaaccgg

SEQ ID NO: 27822 - DNA, 30 bp, Homo sapiens
atgaagtacaagaacaccttcagaaccgga

SEQ ID NO: 27823 - DNA, 30 bp, Homo sapiens
gaagtacaagaacaccttcagaaccggagg

SEQ ID NO: 27824 - DNA, 30 bp, Homo sapiens
aagtacaagaacaccttcagaaccggaggc

SEQ ID NO: 27825 - DNA, 30 bp, Homo sapiens
gtacaagaacaccttcagaaccggaggcaa

SEQ ID NO: 27826 - DNA, 30 bp, Homo sapiens
tacaagaacaccttcagaaccggaggcaac

SEQ ID NO: 27827 - DNA, 30 bp, Homo sapiens
gaaatgttaaaggattcaacacaatggctg

SEQ ID NO: 27828 - DNA, 18 bp, Homo sapiens
aggacaggccagagccaa

SEQ ID NO: 27829 - DNA, 19 bp, Homo sapiens
ccagtggcagacaaatgta

SEQ ID NO: 27830 - DNA, 30 bp, Homo sapiens
gtggcaaatgacttggccctgaaacttctc

SEQ ID NO: 27831 - DNA, 18 bp, Homo sapiens
ccctgaaacttctccggg

SEQ ID NO: 27832 - DNA, 23 bp, Homo sapiens
cttctccgggattattctgcaga

SEQ ID NO: 27833 - DNA, 30 bp, Homo sapiens
ggtgagtgagcgagaggctgctttggaaga

SEQ ID NO: 27834 - DNA, 20 bp, Homo sapiens
gaaactcatagattactgca

SEQ ID NO: 27835 - DNA, 20 bp, Homo sapiens
ctcatagattactgcaacag

SEQ ID NO: 27836 - DNA, 20 bp, Homo sapiens
actgccaatgtcctacagga

SEQ ID NO: 27837 - DNA, 18 bp, Homo sapiens
aaggctcctagaagactc

SEQ ID NO: 27838 - DNA, 23 bp, Homo sapiens
aaagagctgatgaaacaatggca

SEQ ID NO: 27839 - DNA, 20 bp, Homo sapiens
ggatgaaaacagccaaaaaa

SEQ ID NO: 27840 - DNA, 18 bp, Homo sapiens
cctgagatccctggaagg

SEQ ID NO: 27841 - DNA, 25 bp, Homo sapiens
cctgttacaaagacgtttggataac

SEQ ID NO: 27842 - DNA, 20 bp, Homo sapiens
gaacttcaagtggagtgaac

SEQ ID NO: 27843 - DNA, 30 bp, Homo sapiens
gttctttttcaggtcccatttggaagccag

SEQ ID NO: 27844 - DNA, 18 bp, Homo sapiens
ggtgtggctacagctgaa

SEQ ID NO: 27845 - DNA, 17 bp, Homo sapiens
aagccggcaggcaccta

SEQ ID NO: 27846 - DNA, 21 bp, Homo sapiens
ggcgactttccagcagttcag

SEQ ID NO: 27847 - DNA, 22 bp, Homo sapiens
gagggaattgaaaactaaagaa

SEQ ID NO: 27848 - DNA, 19 bp, Homo sapiens
ggaaggactagagaaactc

SEQ ID NO: 27849 - DNA, 22 bp, Homo sapiens
atttagagctgcctcctgagga

SEQ ID NO: 27850 - DNA, 19 bp, Homo sapiens
aagactccaggaacttcaa

SEQ ID NO: 27851 - DNA, 18 bp, Homo sapiens
gcgcctctgaaagagaac

SEQ ID NO: 27852 - DNA, 30 bp, Homo sapiens
gtgagccacgtcaaggaccttgctcgccag

SEQ ID NO: 27853 - DNA, 19 bp, Homo sapiens
caccgtataacctcagcac

SEQ ID NO: 27854 - DNA, 31 bp, Homo sapiens
gaggaccgagtcaggcagctgcatgaagccc

SEQ ID NO: 27855 - DNA, 18 bp, Homo sapiens
catgaagcccacagggac

SEQ ID NO: 27856 - DNA, 18 bp, Homo sapiens
ggtccagcatctcagcac

SEQ ID NO: 27857 - DNA, 27 bp, Homo sapiens
ccagggtccctgggagagagccatctc

SEQ ID NO: 27858 - DNA, 16 bp, Homo sapiens
ccctgggagagagcca

SEQ ID NO: 27859 - DNA, 17 bp, Homo sapiens
cgccaaacaaagtgccc

SEQ ID NO: 27860 - DNA, 25 bp, Homo sapiens
caaacaacttgctgggaccatccca

SEQ ID NO: 27861 - DNA, 19 bp, Homo sapiens
caaacaacttgctgggacc

SEQ ID NO: 27862 - DNA, 21 bp, Homo sapiens
cccaaaatgacagagctctac

SEQ ID NO: 27863 - DNA, 27 bp, Homo sapiens
ctccgaagactgcagaaggccctttgc

SEQ ID NO: 27864 - DNA, 25 bp, Homo sapiens
gttttttgcagtggatctcttgagc

SEQ ID NO: 27865 - DNA, 26 bp, Homo sapiens
gaatgtttatgatacgtacgtatggc

SEQ ID NO: 27866 - DNA, 25 bp, Homo sapiens
atgtgatgccttggaccagcacaac

SEQ ID NO: 27867 - DNA, 25 bp, Homo sapiens
gaccagcccatggatatcctgcaga

SEQ ID NO: 27868 - DNA, 27 bp, Homo sapiens
cataataggggacgaacagggaggatc

SEQ ID NO: 27869 - DNA, 26 bp, Homo sapiens
gttcaacaggattttgtgaccagcgc

SEQ ID NO: 27870 - DNA, 27 bp, Homo sapiens
gaagcggccctcttcctagactggatg

SEQ ID NO: 27871 - DNA, 24 bp, Homo sapiens
tatcaggtacaggagtctaaagca

SEQ ID NO: 27872 - DNA, 24 bp, Homo sapiens
tgccagtgcagactgtcttagagg

SEQ ID NO: 27873 - DNA, 24 bp, Homo sapiens
cagtcccgttactctgatcaactt

SEQ ID NO: 27874 - DNA, 19 bp, Homo sapiens
actctgatcaacttctggc

SEQ ID NO: 27875 - DNA, 18 bp, Homo sapiens
caacttctggccagtaga

SEQ ID NO: 27876 - DNA, 27 bp, Homo sapiens
cctgcctcgtcccctcagctttcacac

SEQ ID NO: 27877 - DNA, 20 bp, Homo sapiens
ctttcacacgatgatactca

SEQ ID NO: 27878 - DNA, 19 bp, Homo sapiens
cacgcattgaacattatgc

SEQ ID NO: 27879 - DNA, 25 bp, Homo sapiens
cagaaatggaaaacagcaatggatc

SEQ ID NO: 27880 - DNA, 18 bp, Homo sapiens
ggaaaacagcaatggatc

SEQ ID NO: 27881 - DNA, 21 bp, Homo sapiens
ttatctaaatgatagcatctc

SEQ ID NO: 27882 - DNA, 25 bp, Homo sapiens
aggactcccccctgagccagcctcg

SEQ ID NO: 27883 - DNA, 17 bp, Homo sapiens
actcccccctgagccag

SEQ ID NO: 27884 - DNA, 19 bp, Homo sapiens
agagtgaggaaagagggga

SEQ ID NO: 27885 - DNA, 25 bp, Homo sapiens
gcagcacgaacataaaggcctgtcc

SEQ ID NO: 27886 - DNA, 19 bp, Homo sapiens
agcagcacgaacataaagg

SEQ ID NO: 27887 - DNA, 18 bp, Homo sapiens
gtcaacacaaaggccgcc

SEQ ID NO: 27888 - DNA, 27 bp, Homo sapiens
ctctacagaggtccgacagcagtcagc

SEQ ID NO: 27889 - DNA, 19 bp, Homo sapiens
tcctctccttctacctctc

SEQ ID NO: 27890 - DNA, 19 bp, Homo sapiens
ccgacagcagtcagcctat

SEQ ID NO: 27891 - DNA, 27 bp, Homo sapiens
tcagtcctccccaggacacaagcacag

SEQ ID NO: 27892 - DNA, 17 bp, Homo sapiens
tcctccccaggacacaa

SEQ ID NO: 27893 - DNA, 18 bp, Homo sapiens
agaggaggtgatggagca

SEQ ID NO: 27894 - DNA, 26 bp, Homo sapiens
gaaatacccctggaaagccaatgaga

SEQ ID NO: 27895 - DNA, 18 bp, Homo sapiens
gaaatacccctggaaagc

SEQ ID NO: 27896 - DNA, 17 bp, Homo sapiens
cccctggaaagccaatg

SEQ ID NO: 27897 - DNA, 31 bp, Homo sapiens
gcctgagctgatctgctggcatcttgcagtt

SEQ ID NO: 27898 - DNA, 22 bp, Homo sapiens
cagcagtagttgtcatctgctc

SEQ ID NO: 27899 - DNA, 29 bp, Homo sapiens
cacaaagtctgcatccaggaacatgggtc

SEQ ID NO: 27900 - DNA, 22 bp, Homo sapiens
ctgcaattccccgagtctctgc

SEQ ID NO: 27901 - DNA, 23 bp, Homo sapiens
ctcataccttctgcttgatgatc

SEQ ID NO: 27902 - DNA, 30 bp, Homo sapiens; identical to SEQ ID NO: 4688

SEQ ID NO: 27903 - DNA, 24 bp, Homo sapiens
gataggtggtatcaacatctgtaa

SEQ ID NO: 27904 - DNA, 21 bp, Homo sapiens
gataggtggtatcaacatctg

SEQ ID NO: 27905 - DNA, 25 bp, Homo sapiens
gataggtggtatcaacatctgtaag

SEQ ID NO: 27906 - DNA, 20 bp, Homo sapiens
ggtggtatcaacatctgtaa

SEQ ID NO: 27907 - DNA, 20 bp, Homo sapiens
gtatcaacatctgtaagcac

SEQ ID NO: 27908 - DNA, 23 bp, Homo sapiens
tgcatgttccagtcgttgtgtgg

SEQ ID NO: 27909 - DNA, 25 bp, Homo sapiens
cactattccagtcaaataggtctgg

SEQ ID NO: 27910 - DNA, 25 bp, Homo sapiens
atttaccaaccttcaggatcgagta

SEQ ID NO: 27911 - DNA, 21 bp, Homo sapiens
ggcctaaaacacatacacata

SEQ ID NO: 27912 - DNA, 24 bp, Homo sapiens
tgtctcagtaatcttcttacctat

SEQ ID NO: 27913 - DNA, 24 bp, Homo sapiens
tcttacctatgactatggatgaga

SEQ ID NO: 27914 - DNA, 20 bp, Homo sapiens
gcatgaactcttgtggatcc

SEQ ID NO: 27915 - DNA, 20 bp, Homo sapiens
ccagggtactacttacatta

SEQ ID NO: 27916 - DNA, 30 bp, Homo sapiens
tgttcagggcatgaactcttgtggatcctt

SEQ ID NO: 27917 - DNA, 31 bp, Homo sapiens
taggaggcgcctcccatcctgtaggtcactg

SEQ ID NO: 27918 - DNA, 31 bp, Homo sapiens
aggtctaggaggcgcctcccatcctgtaggt

SEQ ID NO: 27919 - DNA, 25 bp, Homo sapiens
gcgcctcccatcctgtaggtcactg

SEQ ID NO: 27920 - DNA, 26 bp, Homo sapiens
cttcgaggaggtctaggaggcgcctc

SEQ ID NO: 27921 - DNA, 21 bp, Homo sapiens
ctcccatcctgtaggtcactg

SEQ ID NO: 27922 - DNA, 22 bp, Homo sapiens
taccagtttttgccctgtcagg

SEQ ID NO: 27923 - DNA, 26 bp, Homo sapiens
tcaatatgctgcttcccaaactgaaa

SEQ ID NO: 27924 - DNA, 25 bp, Homo sapiens
ctaggaggcgcctcccatcctgtag

SEQ ID NO: 27925 - DNA, 31 bp, Homo sapiens
ttatgatttccatctacgatgtcagtacttc

SEQ ID NO: 27926 - DNA, 31 bp, Homo sapiens
cttacctgccagtggaggattatattccaaa

SEQ ID NO: 27927 - DNA, 25 bp, Homo sapiens
catcaggattcttacctgccagtgg

SEQ ID NO: 27928 - DNA, 25 bp, Homo sapiens
cgatgtcagtacttccaatattcac

SEQ ID NO: 27929 - DNA, 18 bp, Homo sapiens
accattcatcaggattct

SEQ ID NO: 27930 - DNA, 18 bp, Homo sapiens
acctgccagtggaggatt

SEQ ID NO: 27931 - DNA, 27 bp, Homo sapiens
ccaatattcactaaatcaacctgttaa

SEQ ID NO: 27932 - DNA, 30 bp, Homo sapiens
caggattgttacctgccagtggaggattat

SEQ ID NO: 27933 - DNA, 31 bp, Homo sapiens
acgatgtcagtacttccaatattcactaaat

SEQ ID NO: 27934 - DNA, 31 bp, Homo sapiens
atttccatctacgatgtcagtacttccaata

SEQ ID NO: 27935 - DNA, 21 bp, Homo sapiens
caggagcttccaaatgctgca

SEQ ID NO: 27936 - DNA, 29 bp, Homo sapiens
cttgtcttcaggagcttccaaatgctgca

SEQ ID NO: 27937 - DNA, 22 bp, Homo sapiens
tcctcagcagaaagaagccacg

SEQ ID NO: 27938 - DNA, 20 bp, Homo sapiens
ttagaaatctctccttgtgc

SEQ ID NO: 27939 - DNA, 20 bp, Homo sapiens
taaattgggtgttacacaat

SEQ ID NO: 27940 - DNA, 24 bp, Homo sapiens
ccctgaggcattcccatcttgaat

SEQ ID NO: 27941 - DNA, 20 bp, Homo sapiens
aggacttacttgctttgttt

SEQ ID NO: 27942 - DNA, 23 bp, Homo sapiens
cttgaatttaggagattcatctg

SEQ ID NO: 27943 - DNA, 23 bp, Homo sapiens
catcttctgataattttcctgtt

SEQ ID NO: 27944 - DNA, 24 bp, Homo sapiens
tcttctgtttttgttagccagtca

SEQ ID NO: 27945 - DNA, 20 bp, Homo sapiens
tctatgtaaactgaaaattt

SEQ ID NO: 27946 - DNA, 20 bp, Homo sapiens
ttctggagatccattaaaac

SEQ ID NO: 27947 - DNA, 24 bp, Homo sapiens
cagcagttgcgtgatctccactag

SEQ ID NO: 27948 - DNA, 21 bp, Homo sapiens
ttcatcaactaccaccaccat

SEQ ID NO: 27949 - DNA, 25 bp, Homo sapiens
ctaagcaaaataatctgaccttaag

SEQ ID NO: 27950 - DNA, 28 bp, Homo sapiens
cttgtaaaagaacccagcggtcttctgt

SEQ ID NO: 27951 - DNA, 22 bp, Homo sapiens
catctacagatgtttgcccatc

SEQ ID NO: 27952 - DNA, 23 bp, Homo sapiens
gaaggatgtcttgtaaaagaacc

SEQ ID NO: 27953 - DNA, 20 bp, Homo sapiens
acctgttcttcagtaagacg

SEQ ID NO: 27954 - DNA, 24 bp, Homo sapiens
catgacacacctgttcttcagtaa

SEQ ID NO: 27955 - DNA, 20 bp, Homo sapiens
catttgagaaggatgtcttg

SEQ ID NO: 27956 - DNA, 24 bp, Homo sapiens
atctcccaatacctggagaagaga

SEQ ID NO: 27957 - DNA, 31 bp, Homo sapiens
gccatgcactaaaaaggcactgcaagacatt

SEQ ID NO: 27958 - DNA, 24 bp, Homo sapiens
tctttaaagccagttgtgtgaatc

SEQ ID NO: 27959 - DNA, 21 bp, Homo sapiens
tttctgaaagccatgcactaa

SEQ ID NO: 27960 - DNA, 25 bp, Homo sapiens
gtacatacggccagtttttgaagac

SEQ ID NO: 27961 - DNA, 31 bp, Homo sapiens
ctagatccgcttttaaaacctgttaaaacaa

SEQ ID NO: 27962 - DNA, 31 bp, Homo sapiens
tcttttctagatccgcttttaaaacctgtta

SEQ ID NO: 27963 - DNA, 25 bp, Homo sapiens
ctagatccgcttttaaaacctgtta

SEQ ID NO: 27964 - DNA, 23 bp, Homo sapiens
ccgtcttctgggtcactgactta

SEQ ID NO: 27965 - DNA, 26 bp, Homo sapiens
ctagatccgcttttaaaacctgttaa

SEQ ID NO: 27966 - DNA, 20 bp, Homo sapiens
ccgcttttaaaacctgttaa

SEQ ID NO: 27967 - DNA, 26 bp, Homo sapiens
tggattgctttttcttttctagatcc

SEQ ID NO: 27968 - DNA, 25 bp, Homo sapiens
catgcttccgtcttctgggtcactg

SEQ ID NO: 27969 - DNA, 23 bp, Homo sapiens
gatcttgtttgagtgaatacagt

SEQ ID NO: 27970 - DNA, 22 bp, Homo sapiens
gttatccagccatgcttccgtc

SEQ ID NO: 27971 - DNA, 25 bp, Homo sapiens
tgataattggtatcactaacctgtg

SEQ ID NO: 27972 - DNA, 22 bp, Homo sapiens
gtatcactaacctgtgctgtac

SEQ ID NO: 27973 - DNA, 19 bp, Homo sapiens
ctgctggcatcttgcagtt

SEQ ID NO: 27974 - DNA, 28 bp, Homo sapiens
ctggcagaattcgatccaccggctgttc

SEQ ID NO: 27975 - DNA, 19 bp, Homo sapiens
tgatggggtggtgggttgg

SEQ ID NO: 27976 - DNA, 25 bp, Homo sapiens
atctgcattaacaccctctagaaag

SEQ ID NO: 27977 - DNA, 24 bp, Homo sapiens
ccggctgttcagttgttctgaggc

SEQ ID NO: 27978 - DNA, 28 bp, Homo sapiens
atctgcattaacaccctctagaaagaaa

SEQ ID NO: 27979 - DNA, 28 bp, Homo sapiens
gaaggagaagagattcttaccttacaaa

SEQ ID NO: 27980 - DNA, 20 bp, Homo sapiens
attcgatccaccggctgttc

SEQ ID NO: 27981 - DNA, 20 bp, Homo sapiens
cagcagtagttgtcatctgc

SEQ ID NO: 27982 - DNA, 22 bp, Homo sapiens
gccggttgacttcatcctgtgc

SEQ ID NO: 27983 - DNA, 22 bp, Homo sapiens
ctgcatccaggaacatgggtcc

SEQ ID NO: 27984 - DNA, 23 bp, Homo sapiens
gtctgcatccaggaacatgggtc

SEQ ID NO: 27985 - DNA, 24 bp, Homo sapiens
gttgaagatctgatagccggttga

SEQ ID NO: 27986 - DNA, 24 bp, Homo sapiens
cactcatggtctcctgatagcgca

SEQ ID NO: 27987 - DNA, 23 bp, Homo sapiens
actgctggacccatgtcctgatg

SEQ ID NO: 27988 - DNA, 21 bp, Homo sapiens
ctaagttgaggtatggagagt

SEQ ID NO: 27989 - DNA, 23 bp, Homo sapiens
tattcacagacctgcaattcccc

SEQ ID NO: 27990 - DNA, 26 bp, Homo sapiens
acagtggtgctgagatagtataggcc

SEQ ID NO: 27991 - DNA, 22 bp, Homo sapiens
taggccactttgttgctcttgc

SEQ ID NO: 27992 - DNA, 19 bp, Homo sapiens
ttcagagggcgctttcttc

SEQ ID NO: 27993 - DNA, 23 bp, Homo sapiens
gggcaggccattcctccttcaga

SEQ ID NO: 27994 - DNA, 24 bp, Homo sapiens
tcttcagggtttgtatgtgattct

SEQ ID NO: 27995 - DNA, 27 bp, Homo sapiens
ctgggctgaattgtctgaatatcactg

SEQ ID NO: 27996 - DNA, 26 bp, Homo sapiens
ctgttggcacatgtgatcccactgag

SEQ ID NO: 27997 - DNA, 24 bp, Homo sapiens
gtctatacctgttggcacatgtga

SEQ ID NO: 27998 - DNA, 25 bp, Homo sapiens
tgctttctgtaattcatctggagtt

SEQ ID NO: 27999 - DNA, 26 bp, Homo sapiens
cctcctttctggcatagaccttccac

SEQ ID NO: 28000 - DNA, 25 bp, Homo sapiens
tgtgtcatccattcgtgcatctctg

SEQ ID NO: 28001 - DNA, 25 bp, Homo sapiens
ttaaggcctcttgtgctacaggtgg

SEQ ID NO: 28002 - DNA, 22 bp, Homo sapiens
gacttccaaagtcttgcatttc

SEQ ID NO: 28003 - DNA, 24 bp, Homo sapiens
gccaacatgcccaaacttcctaag

SEQ ID NO: 28004 - DNA, 26 bp, Homo sapiens
cagagatttcctcagctccgccagga

SEQ ID NO: 28005 - DNA, 21 bp, Homo sapiens
cttacatctagcacctcagag

SEQ ID NO: 28006 - DNA, 25 bp, Homo sapiens
tccgccatctgttagggtctgtgcc

SEQ ID NO: 28007 - DNA, 25 bp, Homo sapiens
atttgggttatcctctgaatgtcgc

SEQ ID NO: 28008 - DNA, 22 bp, Homo sapiens
catacctcttcatgtagttccc

SEQ ID NO: 28009 - DNA, 26 bp, Homo sapiens
catttgagctgcgtccaccttgtctg

SEQ ID NO: 28010 - DNA, 26 bp, Homo sapiens
tcctgggcagactggatgctctgttc

SEQ ID NO: 28011 - DNA, 23 bp, Homo sapiens
ttgcctgggcttcctgaggcatt

SEQ ID NO: 28012 - DNA, 24 bp, Homo sapiens
ttctgaaataacatatacctgtgc

SEQ ID NO: 28013 - DNA, 25 bp, Homo sapiens
tagtttctgaaataacatatacctg

SEQ ID NO: 28014 - DNA, 21 bp, Homo sapiens
gacttgtcaaatcagattgga

SEQ ID NO: 28015 - DNA, 24 bp, Homo sapiens
gtttctgaaataacatatacctgt

SEQ ID NO: 28016 - DNA, 20 bp, Homo sapiens
caccagaaatacataccaca

SEQ ID NO: 28017 - DNA, 20 bp, Homo sapiens
caatgatttagctgtgactg

SEQ ID NO: 28018 - DNA, 23 bp, Homo sapiens
cgaaacttcatggagacatcttg

SEQ ID NO: 28019 - DNA, 25 bp, Homo sapiens
cttgtagacgctgctcaaaattggc

SEQ ID NO: 28020 - DNA, 20 bp, Homo sapiens
catgcacacacctttgctcc

SEQ ID NO: 28021 - DNA, 24 bp, Homo sapiens
tctgtacaatctgacgtccagtct

SEQ ID NO: 28022 - DNA, 27 bp, Homo sapiens
gtctttatcaccatttccacttcagac

SEQ ID NO: 28023 - DNA, 25 bp, Homo sapiens
ccgtctgctttttctgtacaatctg

SEQ ID NO: 28024 - DNA, 22 bp, Homo sapiens
tccatatctgtagctgccagcc

SEQ ID NO: 28025 - DNA, 23 bp, Homo sapiens
ccaggcaacttcagaatccaaat

SEQ ID NO: 28026 - DNA, 30 bp, Homo sapiens
tttctgttacctgaaaagaattataatgaa

SEQ ID NO: 28027 - DNA, 25 bp, Homo sapiens
cattcatttcctttcgcatcttacg

SEQ ID NO: 28028 - DNA, 26 bp, Homo sapiens
tgatctctttgtcaattccatatctg

SEQ ID NO: 28029 - DNA, 30 bp, Homo sapiens
ttcagtgatataggttttacctttccccag

SEQ ID NO: 28030 - DNA, 26 bp, Homo sapiens
ctgtagctgccagccattctgtcaag

SEQ ID NO: 28031 - DNA, 21 bp, Homo sapiens
tcttctgctcgggaggtgaca

SEQ ID NO: 28032 - DNA, 20 bp, Homo sapiens
ccagttactattcagaagac

SEQ ID NO: 28033 - DNA, 20 bp, Homo sapiens
tcttcaggtgcaccttctgt

SEQ ID NO: 28034 - DNA, 25 bp, Homo sapiens
tgtgatgtggtccacattctggtca

SEQ ID NO: 28035 - DNA, 20 bp, Homo sapiens
ccatgtgtttctggtattcc

SEQ ID NO: 28036 - DNA, 25 bp, Homo sapiens
cgtgtagagtccacctttgggcgta

SEQ ID NO: 28037 - DNA, 24 bp, Homo sapiens
tactaatttcctgcagtggtcacc

SEQ ID NO: 28038 - DNA, 24 bp, Homo sapiens
ttctgtgtgaaatggctgcaaatc

SEQ ID NO: 28039 - DNA, 20 bp, Homo sapiens
ccttcaaaggaatggaggcc

SEQ ID NO: 28040 - DNA, 25 bp, Homo sapiens
tgctgaatttcagcctccagtggtt

SEQ ID NO: 28041 - DNA, 25 bp, Homo sapiens
tgaagtcttcctctttcagattcac

SEQ ID NO: 28042 - DNA, 20 bp, Homo sapiens
gttgtaagttgtctcctctt

SEQ ID NO: 28043 - DNA, 20 bp, Homo sapiens
ttgtctgtaacagctgctgt

SEQ ID NO: 28044 - DNA, 20 bp, Homo sapiens
gctctaataccttgagagca

SEQ ID NO: 28045 - DNA, 22 bp, Homo sapiens
ctttgagacctcaaatcctgtt

SEQ ID NO: 28046 - DNA, 25 bp, Homo sapiens
ctttattttcctttcatctctgggc

SEQ ID NO: 28047 - DNA, 27 bp, Homo sapiens
atcgtttcttcacggacagtgtgctgg

SEQ ID NO: 28048 - DNA, 24 bp, Homo sapiens
gggcttgtgagacatgagtgattt

SEQ ID NO: 28049 - DNA, 25 bp, Homo sapiens
tatgtgttacctacccttgtcggtc

SEQ ID NO: 28050 - DNA, 20 bp, Homo sapiens
ggagagagcttcctgtagct

SEQ ID NO: 28051 - DNA, 23 bp, Homo sapiens
tcaccctttccacaggcgttgca

SEQ ID NO: 28052 - DNA, 20 bp, Homo sapiens
tttgtgtctttctgagaaac

SEQ ID NO: 28053 - DNA, 20 bp, Homo sapiens
aaagacttaccttaagatac

SEQ ID NO: 28054 - DNA, 20 bp, Homo sapiens
atctgtcaaatcgcctgcag

SEQ ID NO: 28055 - DNA, 20 bp, Homo sapiens
ttaccttgacttgctcaagc

SEQ ID NO: 28056 - DNA, 20 bp, Homo sapiens
tccaggttcaagtgggatac

SEQ ID NO: 28057 - DNA, 25 bp, Homo sapiens
gctcttctgggcttatgggagcact

SEQ ID NO: 28058 - DNA, 27 bp, Homo sapiens
acctttatccactggagatttgtctgc

SEQ ID NO: 28059 - DNA, 21 bp, Homo sapiens
ttccaccagtaactgaaacag

SEQ ID NO: 28060 - DNA, 29 bp, Homo sapiens
ccactcagagctcagatcttctaacttcc

SEQ ID NO: 28061 - DNA, 27 bp, Homo sapiens
cttccactcagagctcagatcttctaa

SEQ ID NO: 28062 - DNA, 25 bp, Homo sapiens
gggatccagtatacttacaggctcc

SEQ ID NO: 28063 - DNA, 26 bp, Homo sapiens
accagagtaacagtctgagtaggagc

SEQ ID NO: 28064 - DNA, 24 bp, Homo sapiens
ttctgtccaagcccggttgaaatc

SEQ ID NO: 28065 - DNA, 30 bp, Homo sapiens; identical to SEQ ID NO: 5664

SEQ ID NO: 28066 - DNA, 25 bp, Homo sapiens
acatcaaggaagatggcatttctag

SEQ ID NO: 28067 - DNA, 30 bp, Homo sapiens; identical to SEQ ID NO: 2082

SEQ ID NO: 28068 - DNA, 25 bp, Homo sapiens
atcattttttctcataccttctgct

SEQ ID NO: 28069 - DNA, 21 bp, Homo sapiens
cacccaccatcaccctctgtg

SEQ ID NO: 28070 - DNA, 22 bp, Homo sapiens
atcatctcgttgatatcctcaa

SEQ ID NO: 28071 - DNA, 21 bp, Homo sapiens
tcctgcattgttgcctgtaag

SEQ ID NO: 28072 - DNA, 21 bp, Homo sapiens
actggggacgcctctgttcca

SEQ ID NO: 28073 - DNA, 20 bp, Homo sapiens
ccgtaatgattgttctagcc

SEQ ID NO: 28074 - DNA, 20 bp, Homo sapiens
tgttaaaaaacttacttcga

SEQ ID NO: 28075 - DNA, 25 bp, Homo sapiens
cattcaactgttgcctccggttctg

SEQ ID NO: 28076 - DNA, 24 bp, Homo sapiens
ctgttgcctccggttctgaaggtg

SEQ ID NO: 28077 - DNA, 31 bp, Homo sapiens; identical to SEQ ID NO: 5220

SEQ ID NO: 28078 - DNA, 21 bp, Homo sapiens
tactaaccttggtttctgtga

SEQ ID NO: 28079 - DNA, 25 bp, Homo sapiens
ctgaaggtgttcttgtacttcatcc

SEQ ID NO: 28080 - DNA, 27 bp, Homo sapiens
tgtatagggaccctccttccatgactc

SEQ ID NO: 28081 - DNA, 25 bp, Homo sapiens
ctaaccttggtttctgtgattttct

SEQ ID NO: 28082 - DNA, 27 bp, Homo sapiens
ggtatctttgatactaaccttggtttc

SEQ ID NO: 28083 - DNA, 22 bp, Homo sapiens
attctttcaactagaataaaag

SEQ ID NO: 28084 - DNA, 25 bp, Homo sapiens
gattctgaattctttcaactagaat

SEQ ID NO: 28085 - DNA, 20 bp, Homo sapiens
atcccactgattctgaattc

SEQ ID NO: 28086 - DNA, 22 bp, Homo sapiens
ttggctctggcctgtcctaaga

SEQ ID NO: 28087 - DNA, 30 bp, Homo sapiens; identical to SEQ ID NO: 4326

SEQ ID NO: 28088 - DNA, 31 bp, Homo sapiens; identical to SEQ ID NO: 3739

SEQ ID NO: 28089 - DNA, 30 bp, Homo sapiens
tattcttttgttcttctagcctggagaaag

SEQ ID NO: 28090 - DNA, 28 bp, Homo sapiens
ctgcttcctccaaccataaaacaaattc

SEQ ID NO: 28091 - DNA, 26 bp, Homo sapiens
ccaatgccatcctggagttcctgtaa

SEQ ID NO: 28092 - DNA, 20 bp, Homo sapiens
tcctgtagaatactggcatc

SEQ ID NO: 28093 - DNA, 27 bp, Homo sapiens
tgcagacctcctgccaccgcagattca

SEQ ID NO: 28094 - DNA, 20 bp, Homo sapiens
ctacctcttttttctgtctg

SEQ ID NO: 28095 - DNA, 20 bp, Homo sapiens
tgtttttgaggattgctgaa

SEQ ID NO: 28096 - DNA, 25 bp, Homo sapiens
ctgcaggtaaaagcatatggatcaa

SEQ ID NO: 28097 - DNA, 25 bp, Homo sapiens
atcgcctgcaggtaaaagcatatgg

SEQ ID NO: 28098 - DNA, 25 bp, Homo sapiens
gtcaaatcgcctgcaggtaaaagca

SEQ ID NO: 28099 - DNA, 25 bp, Homo sapiens
gatctgtcaaatcgcctgcaggtaa

SEQ ID NO: 28100 - DNA, 25 bp, Homo sapiens
caacagatctgtcaaatcgcctgca

SEQ ID NO: 28101 - DNA, 25 bp, Homo sapiens
tttctcaacagatctgtcaaatcgc

SEQ ID NO: 28102 - DNA, 25 bp, Homo sapiens
ccatttctcaacagatctgtcaaat

SEQ ID NO: 28103 - DNA, 25 bp, Homo sapiens
ataatgaaaacgccgccatttctca

SEQ ID NO: 28104 - DNA, 25 bp, Homo sapiens
aaatatctttatatcataatgaaaa

SEQ ID NO: 28105 - DNA, 25 bp, Homo sapiens
tgttagccactgattaaatatcttt

SEQ ID NO: 28106 - DNA, 25 bp, Homo sapiens
aaactgttcagcttctgttagccac

SEQ ID NO: 28107 - DNA, 25 bp, Homo sapiens
ttgtgtctttctgagaaactgttca

SEQ ID NO: 28108 - DNA, 25 bp, Homo sapiens
ccaattctcaggaatttgtgtcttt

SEQ ID NO: 28109 - DNA, 25 bp, Homo sapiens
gtatttagcatgttcccaattctca

SEQ ID NO: 28110 - DNA, 25 bp, Homo sapiens
cttaagataccatttgtatttagca

SEQ ID NO: 28111 - DNA, 25 bp, Homo sapiens
cttaccttaagataccatttgtatt

SEQ ID NO: 28112 - DNA, 25 bp, Homo sapiens
aaagacttaccttaagataccattt

SEQ ID NO: 28113 - DNA, 25 bp, Homo sapiens
aaatcaaagacttaccttaagatac

SEQ ID NO: 28114 - DNA, 25 bp, Homo sapiens
aaaacaaatcaaagacttaccttaa

SEQ ID NO: 28115 - DNA, 25 bp, Homo sapiens
tcgaaaaaacaaatcaaagacttac

SEQ ID NO: 28116 - DNA, 25 bp, Homo sapiens
ctgtaagataccaaaaaggcaaaac

SEQ ID NO: 28117 - DNA, 25 bp, Homo sapiens
cctgtaagataccaaaaaggcaaaa

SEQ ID NO: 28118 - DNA, 25 bp, Homo sapiens
agttcctgtaagataccaaaaaggc

SEQ ID NO: 28119 - DNA, 25 bp, Homo sapiens
gagttcctgtaagataccaaaaagg

SEQ ID NO: 28120 - DNA, 25 bp, Homo sapiens
cctggagttcctgtaagataccaaa

SEQ ID NO: 28121 - DNA, 25 bp, Homo sapiens
tcctggagttcctgtaagataccaa

SEQ ID NO: 28122 - DNA, 25 bp, Homo sapiens
gccatcctggagttcctgtaagata

SEQ ID NO: 28123 - DNA, 25 bp, Homo sapiens
tgccatcctggagttcctgtaagat

SEQ ID NO: 28124 - DNA, 25 bp, Homo sapiens
ccaatgccatcctggagttcctgta

SEQ ID NO: 28125 - DNA, 25 bp, Homo sapiens
cccaatgccatcctggagttcctgt

SEQ ID NO: 28126 - DNA, 25 bp, Homo sapiens
gctgcccaatgccatcctggagttc

SEQ ID NO: 28127 - DNA, 25 bp, Homo sapiens
cgctgcccaatgccatcctggagtt

SEQ ID NO: 28128 - DNA, 25 bp, Homo sapiens
aacagtttgccgctgcccaatgcca

SEQ ID NO: 28129 - DNA, 25 bp, Homo sapiens
ctgacaacagtttgccgctgcccaa

SEQ ID NO: 28130 - DNA, 25 bp, Homo sapiens
gttgcattcaatgttctgacaacag

SEQ ID NO: 28131 - DNA, 25 bp, Homo sapiens
gctgaattatttcttccccagttgc

SEQ ID NO: 28132 - DNA, 25 bp, Homo sapiens
attatttcttccccagttgcattca

SEQ ID NO: 28133 - DNA, 25 bp, Homo sapiens
ggcatctgtttttgaggattgctga

SEQ ID NO: 28134 - DNA, 25 bp, Homo sapiens
tttgaggattgctgaattatttctt

SEQ ID NO: 28135 - DNA, 25 bp, Homo sapiens
aatttttcctgtagaatactggcat

SEQ ID NO: 28136 - DNA, 25 bp, Homo sapiens
atactggcatctgtttttgaggatt

SEQ ID NO: 28137 - DNA, 25 bp, Homo sapiens
accgcagattcaggcttcccaattt

SEQ ID NO: 28138 - DNA, 25 bp, Homo sapiens
ctgtttgcagacctcctgccaccgc

SEQ ID NO: 28139 - DNA, 25 bp, Homo sapiens
agattcaggcttcccaatttttcct

SEQ ID NO: 28140 - DNA, 25 bp, Homo sapiens
ctcttttttctgtctgacagctgtt

SEQ ID NO: 28141 - DNA, 25 bp, Homo sapiens
acctcctgccaccgcagattcaggc

SEQ ID NO: 28142 - DNA, 25 bp, Homo sapiens
cctacctcttttttctgtctgacag

SEQ ID NO: 28143 - DNA, 25 bp, Homo sapiens
gacagctgtttgcagacctcctgcc

SEQ ID NO: 28144 - DNA, 25 bp, Homo sapiens
gtcgccctacctcttttttctgtct

SEQ ID NO: 28145 - DNA, 25 bp, Homo sapiens
gatctgtcgccctacctcttttttc

SEQ ID NO: 28146 - DNA, 25 bp, Homo sapiens
tattagatctgtcgccctacctctt

SEQ ID NO: 28147 - DNA, 25 bp, Homo sapiens
attcctattagatctgtcgccctac

SEQ ID NO: 28148 - DNA, 20 bp, Homo sapiens
agataccaaaaaggcaaaac

SEQ ID NO: 28149 - DNA, 20 bp, Homo sapiens
aagataccaaaaaggcaaaa

SEQ ID NO: 28150 - DNA, 20 bp, Homo sapiens
cctgtaagataccaaaaagg

SEQ ID NO: 28151 - DNA, 20 bp, Homo sapiens
gagttcctgtaagataccaa

SEQ ID NO: 28152 - DNA, 20 bp, Homo sapiens
tcctggagttcctgtaagat

SEQ ID NO: 28153 - DNA, 20 bp, Homo sapiens
tgccatcctggagttcctgt

SEQ ID NO: 28154 - DNA, 20 bp, Homo sapiens
cccaatgccatcctggagtt

SEQ ID NO: 28155 - DNA, 20 bp, Homo sapiens
cgctgcccaatgccatcctg

SEQ ID NO: 28156 - DNA, 20 bp, Homo sapiens
ctgacaacagtttgccgctg

SEQ ID NO: 28157 - DNA, 20 bp, Homo sapiens
gttgcattcaatgttctgac

SEQ ID NO: 28158 - DNA, 20 bp, Homo sapiens
attatttcttccccagttgc

SEQ ID NO: 28159 - DNA, 20 bp, Homo sapiens
tttgaggattgctgaattat

SEQ ID NO: 28160 - DNA, 20 bp, Homo sapiens
atactggcatctgtttttga

SEQ ID NO: 28161 - DNA, 20 bp, Homo sapiens
aatttttcctgtagaatact

SEQ ID NO: 28162 - DNA, 20 bp, Homo sapiens
agattcaggcttcccaattt

SEQ ID NO: 28163 - DNA, 20 bp, Homo sapiens
acctcctgccaccgcagatt

SEQ ID NO: 28164 - DNA, 20 bp, Homo sapiens
gacagctgtttgcagacctc

SEQ ID NO: 28165 - DNA, 20 bp, Homo sapiens
ctcttttttctgtctgacag

SEQ ID NO: 28166 - DNA, 20 bp, Homo sapiens
cctacctcttttttctgtct

SEQ ID NO: 28167 - DNA, 20 bp, Homo sapiens
gtcgccctacctcttttttc

SEQ ID NO: 28168 - DNA, 20 bp, Homo sapiens
gatctgtcgccctacctctt

SEQ ID NO: 28169 - DNA, 20 bp, Homo sapiens
tattagatctgtcgccctac

SEQ ID NO: 28170 - DNA, 20 bp, Homo sapiens
attcctattagatctgtcgc

SEQ ID NO: 28171 - DNA, 25 bp, Homo sapiens
gggggatttgagaaaataaaattac

SEQ ID NO: 28172 - DNA, 25 bp, Homo sapiens
atttgagaaaataaaattaccttga

SEQ ID NO: 28173 - DNA, 25 bp, Homo sapiens
ctagcctggagaaagaagaataaaa

SEQ ID NO: 28174 - DNA, 25 bp, Homo sapiens
agaaaataaaattaccttgacttgc

SEQ ID NO: 28175 - DNA, 25 bp, Homo sapiens
ttcttctagcctggagaaagaagaa

SEQ ID NO: 28176 - DNA, 25 bp, Homo sapiens
ataaaattaccttgacttgctcaag

SEQ ID NO: 28177 - DNA, 25 bp, Homo sapiens
ttttgttcttctagcctggagaaag

SEQ ID NO: 28178 - DNA, 25 bp, Homo sapiens
attaccttgacttgctcaagctttt

SEQ ID NO: 28179 - DNA, 25 bp, Homo sapiens
tattcttttgttcttctagcctgga

SEQ ID NO: 28180 - DNA, 25 bp, Homo sapiens
cttgacttgctcaagcttttctttt

SEQ ID NO: 28181 - DNA, 25 bp, Homo sapiens
caagatattcttttgttcttctagc

SEQ ID NO: 28182 - DNA, 25 bp, Homo sapiens
cttttagttgctgctcttttccagg

SEQ ID NO: 28183 - DNA, 25 bp, Homo sapiens
ccaggttcaagtgggatactagcaa

SEQ ID NO: 28184 - DNA, 25 bp, Homo sapiens
atctctttgaaattctgacaagata

SEQ ID NO: 28185 - DNA, 25 bp, Homo sapiens
agcaatgttatctgcttcctccaac

SEQ ID NO: 28186 - DNA, 25 bp, Homo sapiens
aacaaattcatttaaatctctttga

SEQ ID NO: 28187 - DNA, 25 bp, Homo sapiens
ccaaccataaaacaaattcatttaa

SEQ ID NO: 28188 - DNA, 25 bp, Homo sapiens
ttcctccaaccataaaacaaattca

SEQ ID NO: 28189 - DNA, 25 bp, Homo sapiens
tttaaatctctttgaaattctgaca

SEQ ID NO: 28190 - DNA, 25 bp, Homo sapiens
tgacaagatattcttttgttcttct

SEQ ID NO: 28191 - DNA, 25 bp, Homo sapiens
ttcaagtgggatactagcaatgtta

SEQ ID NO: 28192 - DNA, 25 bp, Homo sapiens
agatattcttttgttcttctagcct

SEQ ID NO: 28193 - DNA, 25 bp, Homo sapiens
ctgctcttttccaggttcaagtggg

SEQ ID NO: 28194 - DNA, 25 bp, Homo sapiens
ttcttttgttcttctagcctggaga

SEQ ID NO: 28195 - DNA, 25 bp, Homo sapiens
cttttcttttagttgctgctctttt

SEQ ID NO: 28196 - DNA, 25 bp, Homo sapiens
ttgttcttctagcctggagaaagaa

SEQ ID NO: 28197 - DNA, 25 bp, Homo sapiens
cttctagcctggagaaagaagaata

SEQ ID NO: 28198 - DNA, 25 bp, Homo sapiens
agcctggagaaagaagaataaaatt

SEQ ID NO: 28199 - DNA, 25 bp, Homo sapiens
ctggagaaagaagaataaaattgtt

SEQ ID NO: 28200 - DNA, 20 bp, Homo sapiens
gaaagaagaataaaattgtt

SEQ ID NO: 28201 - DNA, 20 bp, Homo sapiens
ggagaaagaagaataaaatt

SEQ ID NO: 28202 - DNA, 20 bp, Homo sapiens
agcctggagaaagaagaata

SEQ ID NO: 28203 - DNA, 20 bp, Homo sapiens
cttctagcctggagaaagaa

SEQ ID NO: 28204 - DNA, 20 bp, Homo sapiens
ttgttcttctagcctggaga

SEQ ID NO: 28205 - DNA, 20 bp, Homo sapiens
ttcttttgttcttctagcct

SEQ ID NO: 28206 - DNA, 20 bp, Homo sapiens
tgacaagatattcttttgtt

SEQ ID NO: 28207 - DNA, 20 bp, Homo sapiens
atctctttgaaattctgaca

SEQ ID NO: 28208 - DNA, 20 bp, Homo sapiens
aacaaattcatttaaatctc

SEQ ID NO: 28209 - DNA, 20 bp, Homo sapiens
ttcctccaaccataaaacaa

SEQ ID NO: 28210 - DNA, 20 bp, Homo sapiens
agcaatgttatctgcttcct

SEQ ID NO: 28211 - DNA, 20 bp, Homo sapiens
ttcaagtgggatactagcaa

SEQ ID NO: 28212 - DNA, 20 bp, Homo sapiens
ctgctcttttccaggttcaa

SEQ ID NO: 28213 - DNA, 20 bp, Homo sapiens
cttttcttttagttgctgct

SEQ ID NO: 28214 - DNA, 20 bp, Homo sapiens
cttgacttgctcaagctttt

SEQ ID NO: 28215 - DNA, 20 bp, Homo sapiens
attaccttgacttgctcaag

SEQ ID NO: 28216 - DNA, 20 bp, Homo sapiens
ataaaattaccttgacttgc

SEQ ID NO: 28217 - DNA, 20 bp, Homo sapiens
agaaaataaaattaccttga

SEQ ID NO: 28218 - DNA, 20 bp, Homo sapiens
atttgagaaaataaaattac

SEQ ID NO: 28219 - DNA, 20 bp, Homo sapiens
gggggatttgagaaaataaa

SEQ ID NO: 28220 - DNA, 25 bp, Homo sapiens
ctgaaacagacaaatgcaacaacgt

SEQ ID NO: 28221 - DNA, 25 bp, Homo sapiens
agtaactgaaacagacaaatgcaac

SEQ ID NO: 28222 - DNA, 25 bp, Homo sapiens
ccaccagtaactgaaacagacaaat

SEQ ID NO: 28223 - DNA, 25 bp, Homo sapiens
ctcttccaccagtaactgaaacaga

SEQ ID NO: 28224 - DNA, 25 bp, Homo sapiens
ggcaactcttccaccagtaactgaa

SEQ ID NO: 28225 - DNA, 25 bp, Homo sapiens
gcaggggcaactcttccaccagtaa

SEQ ID NO: 28226 - DNA, 25 bp, Homo sapiens
ctggcgcaggggcaactcttccacc

SEQ ID NO: 28227 - DNA, 25 bp, Homo sapiens
tttaattgtttgagaattccctggc

SEQ ID NO: 28228 - DNA, 25 bp, Homo sapiens
ttgtttgagaattccctggcgcagg

SEQ ID NO: 28229 - DNA, 25 bp, Homo sapiens
gcacgggtcctccagtttcatttaa

SEQ ID NO: 28230 - DNA, 25 bp, Homo sapiens
tccagtttcatttaattgtttgaga

SEQ ID NO: 28231 - DNA, 25 bp, Homo sapiens
gcttatgggagcacttacaagcacg

SEQ ID NO: 28232 - DNA, 25 bp, Homo sapiens
tacaagcacgggtcctccagtttca

SEQ ID NO: 28233 - DNA, 25 bp, Homo sapiens
agtttatcttgctcttctgggctta

SEQ ID NO: 28234 - DNA, 25 bp, Homo sapiens
tctgcttgagcttattttcaagttt

SEQ ID NO: 28235 - DNA, 25 bp, Homo sapiens
atcttgctcttctgggcttatggga

SEQ ID NO: 28236 - DNA, 25 bp, Homo sapiens
ctttatccactggagatttgtctgc

SEQ ID NO: 28237 - DNA, 25 bp, Homo sapiens
cttattttcaagtttatcttgctct

SEQ ID NO: 28238 - DNA, 25 bp, Homo sapiens
ctaacctttatccactggagatttg

SEQ ID NO: 28239 - DNA, 25 bp, Homo sapiens
atttgtctgcttgagcttattttca

SEQ ID NO: 28240 - DNA, 25 bp, Homo sapiens
aatgtctaacctttatccactggag

SEQ ID NO: 28241 - DNA, 25 bp, Homo sapiens
tggttaatgtctaacctttatccac

SEQ ID NO: 28242 - DNA, 25 bp, Homo sapiens
agagatggttaatgtctaaccttta

SEQ ID NO: 28243 - DNA, 25 bp, Homo sapiens
acggaagagatggttaatgtctaac

SEQ ID NO: 28244 - DNA, 20 bp, Homo sapiens
acagacaaatgcaacaacgt

SEQ ID NO: 28245 - DNA, 20 bp, Homo sapiens
ctgaaacagacaaatgcaac

SEQ ID NO: 28246 - DNA, 20 bp, Homo sapiens
agtaactgaaacagacaaat

SEQ ID NO: 28247 - DNA, 20 bp, Homo sapiens
ccaccagtaactgaaacaga

SEQ ID NO: 28248 - DNA, 20 bp, Homo sapiens
ctcttccaccagtaactgaa

SEQ ID NO: 28249 - DNA, 20 bp, Homo sapiens
ggcaactcttccaccagtaa

SEQ ID NO: 28250 - DNA, 20 bp, Homo sapiens
ctggcgcaggggcaactctt

SEQ ID NO: 28251 - DNA, 20 bp, Homo sapiens
ttgtttgagaattccctggc

SEQ ID NO: 28252 - DNA, 20 bp, Homo sapiens
tccagtttcatttaattgtt

SEQ ID NO: 28253 - DNA, 20 bp, Homo sapiens
tacaagcacgggtcctccag

SEQ ID NO: 28254 - DNA, 20 bp, Homo sapiens
gcttatgggagcacttacaa

SEQ ID NO: 28255 - DNA, 20 bp, Homo sapiens
atcttgctcttctgggctta

SEQ ID NO: 28256 - DNA, 20 bp, Homo sapiens
cttattttcaagtttatctt

SEQ ID NO: 28257 - DNA, 20 bp, Homo sapiens
atttgtctgcttgagcttat

SEQ ID NO: 28258 - DNA, 20 bp, Homo sapiens
ctttatccactggagatttg

SEQ ID NO: 28259 - DNA, 20 bp, Homo sapiens
ctaacctttatccactggag

SEQ ID NO: 28260 - DNA, 20 bp, Homo sapiens
aatgtctaacctttatccac

SEQ ID NO: 28261 - DNA, 20 bp, Homo sapiens
tggttaatgtctaaccttta

SEQ ID NO: 28262 - DNA, 20 bp, Homo sapiens
agagatggttaatgtctaac

SEQ ID NO: 28263 - DNA, 20 bp, Homo sapiens
acggaagagatggttaatgt

SEQ ID NO: 28264 - DNA, 25 bp, Homo sapiens
ctgaaaggaaaatacattttaaaaa

SEQ ID NO: 28265 - DNA, 25 bp, Homo sapiens
cctgaaaggaaaatacattttaaaa

SEQ ID NO: 28266 - DNA, 25 bp, Homo sapiens
gaaacctgaaaggaaaatacatttt

SEQ ID NO: 28267 - DNA, 25 bp, Homo sapiens
ggaaacctgaaaggaaaatacattt

SEQ ID NO: 28268 - DNA, 25 bp, Homo sapiens
ctctggaaacctgaaaggaaaatac

SEQ ID NO: 28269 - DNA, 25 bp, Homo sapiens
gctctggaaacctgaaaggaaaata

SEQ ID NO: 28270 - DNA, 25 bp, Homo sapiens
taaagctctggaaacctgaaaggaa

SEQ ID NO: 28271 - DNA, 25 bp, Homo sapiens
gtaaagctctggaaacctgaaagga

SEQ ID NO: 28272 - DNA, 25 bp, Homo sapiens
tcaggtaaagctctggaaacctgaa

SEQ ID NO: 28273 - DNA, 25 bp, Homo sapiens
ctcaggtaaagctctggaaacctga

SEQ ID NO: 28274 - DNA, 25 bp, Homo sapiens
gtttctcaggtaaagctctggaaac

SEQ ID NO: 28275 - DNA, 25 bp, Homo sapiens
tgtttctcaggtaaagctctggaaa

SEQ ID NO: 28276 - DNA, 25 bp, Homo sapiens
aatttctccttgtttctcaggtaaa

SEQ ID NO: 28277 - DNA, 25 bp, Homo sapiens
tttgagcttcaatttctccttgttt

SEQ ID NO: 28278 - DNA, 25 bp, Homo sapiens
ttttatttgagcttcaatttctcct

SEQ ID NO: 28279 - DNA, 25 bp, Homo sapiens
aagctgcccaaggtcttttatttga

SEQ ID NO: 28280 - DNA, 25 bp, Homo sapiens
aggtcttcaagctttttttcaagct

SEQ ID NO: 28281 - DNA, 25 bp, Homo sapiens
ttcaagctttttttcaagctgccca

SEQ ID NO: 28282 - DNA, 25 bp, Homo sapiens
gatgatttaactgctcttcaaggtc

SEQ ID NO: 28283 - DNA, 25 bp, Homo sapiens
ctgctcttcaaggtcttcaagcttt

SEQ ID NO: 28284 - DNA, 25 bp, Homo sapiens
aggagataaccacagcagcagatga

SEQ ID NO: 28285 - DNA, 25 bp, Homo sapiens
cagcagatgatttaactgctcttca

SEQ ID NO: 28286 - DNA, 25 bp, Homo sapiens
atttccaactgattcctaataggag

SEQ ID NO: 28287 - DNA, 25 bp, Homo sapiens
cttggtttggttggttataaatttc

SEQ ID NO: 28288 - DNA, 25 bp, Homo sapiens
caactgattcctaataggagataac

SEQ ID NO: 28289 - DNA, 25 bp, Homo sapiens
cttaacgtcaaatggtccttcttgg

SEQ ID NO: 28290 - DNA, 25 bp, Homo sapiens
ttggttataaatttccaactgattc

SEQ ID NO: 28291 - DNA, 25 bp, Homo sapiens
cctaccttaacgtcaaatggtcctt

SEQ ID NO: 28292 - DNA, 25 bp, Homo sapiens
tccttcttggtttggttggttataa

SEQ ID NO: 28293 - DNA, 25 bp, Homo sapiens
agttccctaccttaacgtcaaatgg

SEQ ID NO: 28294 - DNA, 25 bp, Homo sapiens
caaaaagttccctaccttaacgtca

SEQ ID NO: 28295 - DNA, 25 bp, Homo sapiens
taaagcaaaaagttccctaccttaa

SEQ ID NO: 28296 - DNA, 25 bp, Homo sapiens
atatttaaagcaaaaagttccctac

SEQ ID NO: 28297 - DNA, 20 bp, Homo sapiens
aggaaaatacattttaaaaa

SEQ ID NO: 28298 - DNA, 20 bp, Homo sapiens
aaggaaaatacattttaaaa

SEQ ID NO: 28299 - DNA, 20 bp, Homo sapiens
cctgaaaggaaaatacattt

SEQ ID NO: 28300 - DNA, 20 bp, Homo sapiens
ggaaacctgaaaggaaaata

SEQ ID NO: 28301 - DNA, 20 bp, Homo sapiens
gctctggaaacctgaaagga

SEQ ID NO: 28302 - DNA, 20 bp, Homo sapiens
gtaaagctctggaaacctga

SEQ ID NO: 28303 - DNA, 20 bp, Homo sapiens
ctcaggtaaagctctggaaa

SEQ ID NO: 28304 - DNA, 20 bp, Homo sapiens
aatttctccttgtttctcag

SEQ ID NO: 28305 - DNA, 20 bp, Homo sapiens
ttttatttgagcttcaattt

SEQ ID NO: 28306 - DNA, 20 bp, Homo sapiens
aagctgcccaaggtctttta

SEQ ID NO: 28307 - DNA, 20 bp, Homo sapiens
ttcaagctttttttcaagct

SEQ ID NO: 28308 - DNA, 20 bp, Homo sapiens
ctgctcttcaaggtcttcaa

SEQ ID NO: 28309 - DNA, 20 bp, Homo sapiens
cagcagatgatttaactgct

SEQ ID NO: 28310 - DNA, 20 bp, Homo sapiens
aggagataaccacagcagca

SEQ ID NO: 28311 - DNA, 20 bp, Homo sapiens
caactgattcctaataggag

SEQ ID NO: 28312 - DNA, 20 bp, Homo sapiens
ttggttataaatttccaact

SEQ ID NO: 28313 - DNA, 20 bp, Homo sapiens
tccttcttggtttggttggt

SEQ ID NO: 28314 - DNA, 20 bp, Homo sapiens
cttaacgtcaaatggtcctt

SEQ ID NO: 28315 - DNA, 20 bp, Homo sapiens
cctaccttaacgtcaaatgg

SEQ ID NO: 28316 - DNA, 20 bp, Homo sapiens
agttccctaccttaacgtca

SEQ ID NO: 28317 - DNA, 20 bp, Homo sapiens
caaaaagttccctaccttaa

SEQ ID NO: 28318 - DNA, 20 bp, Homo sapiens
taaagcaaaaagttccctac

SEQ ID NO: 28319 - DNA, 20 bp, Homo sapiens
atatttaaagcaaaaagttc

SEQ ID NO: 28320 - DNA, 25 bp, Homo sapiens
ctggggaaaagaacccatatagtgc

SEQ ID NO: 28321 - DNA, 25 bp, Homo sapiens
tcctggggaaaagaacccatatagt

SEQ ID NO: 28322 - DNA, 25 bp, Homo sapiens
gtttcctggggaaaagaacccatat

SEQ ID NO: 28323 - DNA, 25 bp, Homo sapiens
cagtttcctggggaaaagaacccat

SEQ ID NO: 28324 - DNA, 25 bp, Homo sapiens
tttcagtttcctggggaaaagaacc

SEQ ID NO: 28325 - DNA, 25 bp, Homo sapiens
tatttcagtttcctggggaaaagaa

SEQ ID NO: 28326 - DNA, 25 bp, Homo sapiens
tgctatttcagtttcctggggaaaa

SEQ ID NO: 28327 - DNA, 25 bp, Homo sapiens
actgctatttcagtttcctggggaa

SEQ ID NO: 28328 - DNA, 25 bp, Homo sapiens
tgaactgctatttcagtttcctggg

SEQ ID NO: 28329 - DNA, 25 bp, Homo sapiens
cttgaactgctatttcagtttcctg

SEQ ID NO: 28330 - DNA, 25 bp, Homo sapiens
tagcttgaactgctatttcagtttc

SEQ ID NO: 28331 - DNA, 25 bp, Homo sapiens
tttagcttgaactgctatttcagtt

SEQ ID NO: 28332 - DNA, 25 bp, Homo sapiens
ttccacatccggttgtttagcttga

SEQ ID NO: 28333 - DNA, 25 bp, Homo sapiens
tgccctttagacaaaatctcttcca

SEQ ID NO: 28334 - DNA, 25 bp, Homo sapiens
tttagacaaaatctcttccacatcc

SEQ ID NO: 28335 - DNA, 25 bp, Homo sapiens
gtttttccttgtacaaatgctgccc

SEQ ID NO: 28336 - DNA, 25 bp, Homo sapiens
gtacaaatgctgccctttagacaaa

SEQ ID NO: 28337 - DNA, 25 bp, Homo sapiens
cttcactggctgagtggctggtttt

SEQ ID NO: 28338 - DNA, 25 bp, Homo sapiens
ggctggtttttccttgtacaaatgc

SEQ ID NO: 28339 - DNA, 25 bp, Homo sapiens
attaccttcactggctgagtggctg

SEQ ID NO: 28340 - DNA, 25 bp, Homo sapiens
gcttcattaccttcactggctgagt

SEQ ID NO: 28341 - DNA, 25 bp, Homo sapiens
aggttgcttcattaccttcactggc

SEQ ID NO: 28342 - DNA, 25 bp, Homo sapiens
gctagaggttgcttcattaccttca

SEQ ID NO: 28343 - DNA, 25 bp, Homo sapiens
atattgctagaggttgcttcattac

SEQ ID NO: 28344 - DNA, 20 bp, Homo sapiens
gaaaagaacccatatagtgc

SEQ ID NO: 28345 - DNA, 20 bp, Homo sapiens
gggaaaagaacccatatagt

SEQ ID NO: 28346 - DNA, 20 bp, Homo sapiens
tcctggggaaaagaacccat

SEQ ID NO: 28347 - DNA, 20 bp, Homo sapiens
cagtttcctggggaaaagaa

SEQ ID NO: 28348 - DNA, 20 bp, Homo sapiens
tatttcagtttcctggggaa

SEQ ID NO: 28349 - DNA, 20 bp, Homo sapiens
actgctatttcagtttcctg

SEQ ID NO: 28350 - DNA, 20 bp, Homo sapiens
cttgaactgctatttcagtt

SEQ ID NO: 28351 - DNA, 20 bp, Homo sapiens
tttagcttgaactgctattt

SEQ ID NO: 28352 - DNA, 20 bp, Homo sapiens
ttccacatccggttgtttag

SEQ ID NO: 28353 - DNA, 20 bp, Homo sapiens
tttagacaaaatctcttcca

SEQ ID NO: 28354 - DNA, 20 bp, Homo sapiens
gtacaaatgctgccctttag

SEQ ID NO: 28355 - DNA, 20 bp, Homo sapiens
ggctggtttttccttgtaca

SEQ ID NO: 28356 - DNA, 20 bp, Homo sapiens
cttcactggctgagtggctg

SEQ ID NO: 28357 - DNA, 20 bp, Homo sapiens
attaccttcactggctgagt

SEQ ID NO: 28358 - DNA, 20 bp, Homo sapiens
gcttcattaccttcactggc

SEQ ID NO: 28359 - DNA, 20 bp, Homo sapiens
aggttgcttcattaccttca

SEQ ID NO: 28360 - DNA, 20 bp, Homo sapiens
gctagaggttgcttcattac

SEQ ID NO: 28361 - DNA, 20 bp, Homo sapiens
atattgctagaggttgcttc

SEQ ID NO: 28362 - DNA, 25 bp, Homo sapiens
ctttaacagaaaagcatacacatta

SEQ ID NO: 28363 - DNA, 25 bp, Homo sapiens
tcctctttaacagaaaagcatacac

SEQ ID NO: 28364 - DNA, 25 bp, Homo sapiens
ttcctctttaacagaaaagcataca

SEQ ID NO: 28365 - DNA, 25 bp, Homo sapiens
taacttcctctttaacagaaaagca

SEQ ID NO: 28366 - DNA, 25 bp, Homo sapiens
ctaacttcctctttaacagaaaagc

SEQ ID NO: 28367 - DNA, 25 bp, Homo sapiens
tcttctaacttcctctttaacagaa

SEQ ID NO: 28368 - DNA, 25 bp, Homo sapiens
atcttctaacttcctctttaacaga

SEQ ID NO: 28369 - DNA, 25 bp, Homo sapiens
tcagatcttctaacttcctctttaa

SEQ ID NO: 28370 - DNA, 25 bp, Homo sapiens
ctcagatcttctaacttcctcttta

SEQ ID NO: 28371 - DNA, 25 bp, Homo sapiens
agagctcagatcttctaacttcctc

SEQ ID NO: 28372 - DNA, 25 bp, Homo sapiens
cagagctcagatcttctaacttcct

SEQ ID NO: 28373 - DNA, 25 bp, Homo sapiens
ccttccactcagagctcagatcttc

SEQ ID NO: 28374 - DNA, 25 bp, Homo sapiens
gtaaacggtttaccgccttccactc

SEQ ID NO: 28375 - DNA, 25 bp, Homo sapiens
ctttgccctcagctcttgaagtaaa

SEQ ID NO: 28376 - DNA, 25 bp, Homo sapiens
ccctcagctcttgaagtaaacggtt

SEQ ID NO: 28377 - DNA, 25 bp, Homo sapiens
ccaggagctaggtcaggctgctttg

SEQ ID NO: 28378 - DNA, 25 bp, Homo sapiens
ggtcaggctgctttgccctcagctc

SEQ ID NO: 28379 - DNA, 25 bp, Homo sapiens
aggctccaatagtggtcagtccagg

SEQ ID NO: 28380 - DNA, 25 bp, Homo sapiens
tcagtccaggagctaggtcaggctg

SEQ ID NO: 28381 - DNA, 25 bp, Homo sapiens
cttacaggctccaatagtggtcagt

SEQ ID NO: 28382 - DNA, 25 bp, Homo sapiens
gtatacttacaggctccaatagtgg

SEQ ID NO: 28383 - DNA, 25 bp, Homo sapiens
atccagtatacttacaggctccaat

SEQ ID NO: 28384 - DNA, 25 bp, Homo sapiens
atgggatccagtatacttacaggct

SEQ ID NO: 28385 - DNA, 25 bp, Homo sapiens
agagaatgggatccagtatacttac

SEQ ID NO: 28386 - DNA, 20 bp, Homo sapiens
acagaaaagcatacacatta

SEQ ID NO: 28387 - DNA, 20 bp, Homo sapiens
tttaacagaaaagcatacac

SEQ ID NO: 28388 - DNA, 20 bp, Homo sapiens
tcctctttaacagaaaagca

SEQ ID NO: 28389 - DNA, 20 bp, Homo sapiens
taacttcctctttaacagaa

SEQ ID NO: 28390 - DNA, 20 bp, Homo sapiens
tcttctaacttcctctttaa

SEQ ID NO: 28391 - DNA, 20 bp, Homo sapiens
tcagatcttctaacttcctc

SEQ ID NO: 28392 - DNA, 20 bp, Homo sapiens
ccttccactcagagctcaga

SEQ ID NO: 28393 - DNA, 20 bp, Homo sapiens
gtaaacggtttaccgccttc

SEQ ID NO: 28394 - DNA, 20 bp, Homo sapiens
ccctcagctcttgaagtaaa

SEQ ID NO: 28395 - DNA, 20 bp, Homo sapiens
ggtcaggctgctttgccctc

SEQ ID NO: 28396 - DNA, 20 bp, Homo sapiens
tcagtccaggagctaggtca

SEQ ID NO: 28397 - DNA, 20 bp, Homo sapiens
aggctccaatagtggtcagt

SEQ ID NO: 28398 - DNA, 20 bp, Homo sapiens
cttacaggctccaatagtgg

SEQ ID NO: 28399 - DNA, 20 bp, Homo sapiens
gtatacttacaggctccaat

SEQ ID NO: 28400 - DNA, 20 bp, Homo sapiens
atccagtatacttacaggct

SEQ ID NO: 28401 - DNA, 20 bp, Homo sapiens
atgggatccagtatacttac

SEQ ID NO: 28402 - DNA, 20 bp, Homo sapiens
agagaatgggatccagtata

SEQ ID NO: 28403 - DNA, 26 bp, Homo sapiens
ctaaaatattttgggtttttgcaaaa

SEQ ID NO: 28404 - DNA, 26 bp, Homo sapiens
gctaaaatattttgggtttttgcaaa

SEQ ID NO: 28405 - DNA, 26 bp, Homo sapiens
taggagctaaaatattttgggttttt

SEQ ID NO: 28406 - DNA, 25 bp, Homo sapiens
agtaggagctaaaatattttgggtt

SEQ ID NO: 28407 - DNA, 25 bp, Homo sapiens
tgagtaggagctaaaatattttggg

SEQ ID NO: 28408 - DNA, 26 bp, Homo sapiens
ctgagtaggagctaaaatattttggg

SEQ ID NO: 28409 - DNA, 25 bp, Homo sapiens
cagtctgagtaggagctaaaatatt

SEQ ID NO: 28410 - DNA, 26 bp, Homo sapiens
acagtctgagtaggagctaaaatatt

SEQ ID NO: 28411 - DNA, 26 bp, Homo sapiens
gagtaacagtctgagtaggagctaaa

SEQ ID NO: 28412 - DNA, 25 bp, Homo sapiens
cagagtaacagtctgagtaggagct

SEQ ID NO: 28413 - DNA, 26 bp, Homo sapiens
caccagagtaacagtctgagtaggag

SEQ ID NO: 28414 - DNA, 25 bp, Homo sapiens
gtcaccagagtaacagtctgagtag

SEQ ID NO: 28415 - DNA, 26 bp, Homo sapiens
aaccacaggttgtgtcaccagagtaa

SEQ ID NO: 28416 - DNA, 25 bp, Homo sapiens
gttgtgtcaccagagtaacagtctg

SEQ ID NO: 28417 - DNA, 26 bp, Homo sapiens
tggcagtttccttagtaaccacaggt

SEQ ID NO: 28418 - DNA, 26 bp, Homo sapiens
atttctagtttggagatggcagtttc

SEQ ID NO: 28419 - DNA, 25 bp, Homo sapiens
ggaagatggcatttctagtttggag

SEQ ID NO: 28420 - DNA, 26 bp, Homo sapiens
catcaaggaagatggcatttctagtt

SEQ ID NO: 28421 - DNA, 26 bp, Homo sapiens
gagcaggtacctccaacatcaaggaa

SEQ ID NO: 28422 - DNA, 25 bp, Homo sapiens
atctgccagagcaggtacctccaac

SEQ ID NO: 28423 - DNA, 26 bp, Homo sapiens
aagttctgtccaagcccggttgaaat

SEQ ID NO: 28424 - DNA, 26 bp, Homo sapiens
cggttgaaatctgccagagcaggtac

SEQ ID NO: 28425 - DNA, 26 bp, Homo sapiens
gagaaagccagtcggtaagttctgtc

SEQ ID NO: 28426 - DNA, 25 bp, Homo sapiens
gtcggtaagttctgtccaagcccgg

SEQ ID NO: 28427 - DNA, 26 bp, Homo sapiens
ataacttgatcaagcagagaaagcca

SEQ ID NO: 28428 - DNA, 25 bp, Homo sapiens
aagcagagaaagccagtcggtaagt

SEQ ID NO: 28429 - DNA, 26 bp, Homo sapiens
caccctctgtgattttataacttgat

SEQ ID NO: 28430 - DNA, 26 bp, Homo sapiens
caaggtcacccaccatcaccctctgt

SEQ ID NO: 28431 - DNA, 25 bp, Homo sapiens
catcaccctctgtgattttataact

SEQ ID NO: 28432 - DNA, 26 bp, Homo sapiens
cttctgcttgatgatcatctcgttga

SEQ ID NO: 28433 - DNA, 26 bp, Homo sapiens
ccttctgcttgatgatcatctcgttg

SEQ ID NO: 28434 - DNA, 26 bp, Homo sapiens
atctcgttgatatcctcaaggtcacc

SEQ ID NO: 28435 - DNA, 26 bp, Homo sapiens
tcataccttctgcttgatgatcatct

SEQ ID NO: 28436 - DNA, 26 bp, Homo sapiens
tcattttttctcataccttctgcttg

SEQ ID NO: 28437 - DNA, 26 bp, Homo sapiens
ttttctcataccttctgcttgatgat

SEQ ID NO: 28438 - DNA, 26 bp, Homo sapiens
ttttatcattttttctcataccttct

SEQ ID NO: 28439 - DNA, 26 bp, Homo sapiens
ccaacttttatcattttttctcatac

SEQ ID NO: 28440 - DNA, 20 bp, Homo sapiens
atattttgggtttttgcaaa

SEQ ID NO: 28441 - DNA, 20 bp, Homo sapiens
aaaatattttgggtttttgc

SEQ ID NO: 28442 - DNA, 20 bp, Homo sapiens
gagctaaaatattttgggtt

SEQ ID NO: 28443 - DNA, 20 bp, Homo sapiens
agtaggagctaaaatatttt

SEQ ID NO: 28444 - DNA, 20 bp, Homo sapiens
gtctgagtaggagctaaaat

SEQ ID NO: 28445 - DNA, 20 bp, Homo sapiens
taacagtctgagtaggagct

SEQ ID NO: 28446 - DNA, 20 bp, Homo sapiens
cagagtaacagtctgagtag

SEQ ID NO: 28447 - DNA, 20 bp, Homo sapiens
cacaggttgtgtcaccagag

SEQ ID NO: 28448 - DNA, 20 bp, Homo sapiens
agtttccttagtaaccacag

SEQ ID NO: 28449 - DNA, 20 bp, Homo sapiens
tagtttggagatggcagttt

SEQ ID NO: 28450 - DNA, 20 bp, Homo sapiens
ggaagatggcatttctagtt

SEQ ID NO: 28451 - DNA, 20 bp, Homo sapiens
tacctccaacatcaaggaag

SEQ ID NO: 28452 - DNA, 20 bp, Homo sapiens
atctgccagagcaggtacct

SEQ ID NO: 28453 - DNA, 20 bp, Homo sapiens
ccaagcccggttgaaatctg

SEQ ID NO: 28454 - DNA, 20 bp, Homo sapiens
gtcggtaagttctgtccaag

SEQ ID NO: 28455 - DNA, 20 bp, Homo sapiens
aagcagagaaagccagtcgg

SEQ ID NO: 28456 - DNA, 20 bp, Homo sapiens
ttttataacttgatcaagca

SEQ ID NO: 28457 - DNA, 20 bp, Homo sapiens
catcaccctctgtgatttta

SEQ ID NO: 28458 - DNA, 20 bp, Homo sapiens
ctcaaggtcacccaccatca

SEQ ID NO: 28459 - DNA, 20 bp, Homo sapiens
catctcgttgatatcctcaa

SEQ ID NO: 28460 - DNA, 20 bp, Homo sapiens
cttctgcttgatgatcatct

SEQ ID NO: 28461 - DNA, 20 bp, Homo sapiens
cataccttctgcttgatgat

SEQ ID NO: 28462 - DNA, 20 bp, Homo sapiens
tttctcataccttctgcttg

SEQ ID NO: 28463 - DNA, 20 bp, Homo sapiens
cattttttctcataccttct

SEQ ID NO: 28464 - DNA, 20 bp, Homo sapiens
tttatcattttttctcatac

SEQ ID NO: 28465 - DNA, 20 bp, Homo sapiens
caacttttatcattttttct

SEQ ID NO: 28466 - DNA, 25 bp, Homo sapiens
ctgtaagaacaaatatcccttagta

SEQ ID NO: 28467 - DNA, 25 bp, Homo sapiens
tgcctgtaagaacaaatatccctta

SEQ ID NO: 28468 - DNA, 25 bp, Homo sapiens
gttgcctgtaagaacaaatatccct

SEQ ID NO: 28469 - DNA, 25 bp, Homo sapiens
attgttgcctgtaagaacaaatatc

SEQ ID NO: 28470 - DNA, 25 bp, Homo sapiens
gcattgttgcctgtaagaacaaata

SEQ ID NO: 28471 - DNA, 25 bp, Homo sapiens
cctgcattgttgcctgtaagaacaa

SEQ ID NO: 28472 - DNA, 25 bp, Homo sapiens
atcctgcattgttgcctgtaagaac

SEQ ID NO: 28473 - DNA, 25 bp, Homo sapiens
caaatcctgcattgttgcctgtaag

SEQ ID NO: 28474 - DNA, 25 bp, Homo sapiens
tccaaatcctgcattgttgcctgta

SEQ ID NO: 28475 - DNA, 25 bp, Homo sapiens
tgttccaaatcctgcattgttgcct

SEQ ID NO: 28476 - DNA, 25 bp, Homo sapiens
tctgttccaaatcctgcattgttgc

SEQ ID NO: 28477 - DNA, 25 bp, Homo sapiens
aactggggacgcctctgttccaaat

SEQ ID NO: 28478 - DNA, 25 bp, Homo sapiens
gcctctgttccaaatcctgcattgt

SEQ ID NO: 28479 - DNA, 25 bp, Homo sapiens
cagcggtaatgagttcttccaactg

SEQ ID NO: 28480 - DNA, 25 bp, Homo sapiens
cttccaactggggacgcctctgttc

SEQ ID NO: 28481 - DNA, 25 bp, Homo sapiens
cttgtttttcaaattttgggcagcg

SEQ ID NO: 28482 - DNA, 25 bp, Homo sapiens
ctagcctcttgattgctggtcttgt

SEQ ID NO: 28483 - DNA, 25 bp, Homo sapiens
ttttcaaattttgggcagcggtaat

SEQ ID NO: 28484 - DNA, 25 bp, Homo sapiens
ttcgatccgtaatgattgttctagc

SEQ ID NO: 28485 - DNA, 25 bp, Homo sapiens
gattgctggtcttgtttttcaaatt

SEQ ID NO: 28486 - DNA, 25 bp, Homo sapiens
cttacttcgatccgtaatgattgtt

SEQ ID NO: 28487 - DNA, 25 bp, Homo sapiens
ttgttctagcctcttgattgctggt

SEQ ID NO: 28488 - DNA, 25 bp, Homo sapiens
aaaaacttacttcgatccgtaatga

SEQ ID NO: 28489 - DNA, 25 bp, Homo sapiens
tgttaaaaaacttacttcgatccgt

SEQ ID NO: 28490 - DNA, 25 bp, Homo sapiens
atgcttgttaaaaaacttacttcga

SEQ ID NO: 28491 - DNA, 25 bp, Homo sapiens
gtcccatgcttgttaaaaaacttac

SEQ ID NO: 28492 - DNA, 20 bp, Homo sapiens
agaacaaatatcccttagta

SEQ ID NO: 28493 - DNA, 20 bp, Homo sapiens
gtaagaacaaatatccctta

SEQ ID NO: 28494 - DNA, 20 bp, Homo sapiens
tgcctgtaagaacaaatatc

SEQ ID NO: 28495 - DNA, 20 bp, Homo sapiens
attgttgcctgtaagaacaa

SEQ ID NO: 28496 - DNA, 20 bp, Homo sapiens
cctgcattgttgcctgtaag

SEQ ID NO: 28497 - DNA, 20 bp, Homo sapiens
caaatcctgcattgttgcct

SEQ ID NO: 28498 - DNA, 20 bp, Homo sapiens
gcctctgttccaaatcctgc

SEQ ID NO: 28499 - DNA, 20 bp, Homo sapiens
cttccaactggggacgcctc

SEQ ID NO: 28500 - DNA, 20 bp, Homo sapiens
cagcggtaatgagttcttcc

SEQ ID NO: 28501 - DNA, 20 bp, Homo sapiens
ttttcaaattttgggcagcg

SEQ ID NO: 28502 - DNA, 20 bp, Homo sapiens
gattgctggtcttgtttttc

SEQ ID NO: 28503 - DNA, 20 bp, Homo sapiens
ttgttctagcctcttgattg

SEQ ID NO: 28504 - DNA, 20 bp, Homo sapiens
ttcgatccgtaatgattgtt

SEQ ID NO: 28505 - DNA, 20 bp, Homo sapiens
cttacttcgatccgtaatga

SEQ ID NO: 28506 - DNA, 20 bp, Homo sapiens
aaaaacttacttcgatccgt

SEQ ID NO: 28507 - DNA, 20 bp, Homo sapiens
atgcttgttaaaaaacttac

SEQ ID NO: 28508 - DNA, 20 bp, Homo sapiens
gtcccatgcttgttaaaaaa

SEQ ID NO: 28509 - DNA, 25 bp, Homo sapiens
ctagaataaaaggaaaaataaatat

SEQ ID NO: 28510 - DNA, 25 bp, Homo sapiens
aactagaataaaaggaaaaataaat

SEQ ID NO: 28511 - DNA, 25 bp, Homo sapiens
ttcaactagaataaaaggaaaaata

SEQ ID NO: 28512 - DNA, 25 bp, Homo sapiens
ctttcaactagaataaaaggaaaaa

SEQ ID NO: 28513 - DNA, 25 bp, Homo sapiens
attctttcaactagaataaaaggaa

SEQ ID NO: 28514 - DNA, 25 bp, Homo sapiens
gaattctttcaactagaataaaagg

SEQ ID NO: 28515 - DNA, 25 bp, Homo sapiens
tctgaattctttcaactagaataaa

SEQ ID NO: 28516 - DNA, 25 bp, Homo sapiens
attctgaattctttcaactagaata

SEQ ID NO: 28517 - DNA, 25 bp, Homo sapiens
ctgattctgaattctttcaactaga

SEQ ID NO: 28518 - DNA, 25 bp, Homo sapiens
cactgattctgaattctttcaacta

SEQ ID NO: 28519 - DNA, 25 bp, Homo sapiens
tcccactgattctgaattctttcaa

SEQ ID NO: 28520 - DNA, 25 bp, Homo sapiens
catcccactgattctgaattctttc

SEQ ID NO: 28521 - DNA, 25 bp, Homo sapiens
tacttcatcccactgattctgaatt

SEQ ID NO: 28522 - DNA, 24 bp, Homo sapiens
cggttctgaaggtgttcttgtact

SEQ ID NO: 28523 - DNA, 25 bp, Homo sapiens
ctgttgcctccggttctgaaggtgt

SEQ ID NO: 28524 - DNA, 25 bp, Homo sapiens
tttcattcaactgttgcctccggtt

SEQ ID NO: 28525 - DNA, 25 bp, Homo sapiens
taacatttcattcaactgttgcctc

SEQ ID NO: 28526 - DNA, 25 bp, Homo sapiens
ttgtgttgaatcctttaacatttca

SEQ ID NO: 28527 - DNA, 25 bp, Homo sapiens
tcttccttagcttccagccattgtg

SEQ ID NO: 28528 - DNA, 25 bp, Homo sapiens
cttagcttccagccattgtgttgaa

SEQ ID NO: 28529 - DNA, 25 bp, Homo sapiens
gtcctaagacctgctcagcttcttc

SEQ ID NO: 28530 - DNA, 25 bp, Homo sapiens
ctgctcagcttcttccttagcttcc

SEQ ID NO: 28531 - DNA, 25 bp, Homo sapiens
ctcaagcttggctctggcctgtcct

SEQ ID NO: 28532 - DNA, 25 bp, Homo sapiens
ggcctgtcctaagacctgctcagct

SEQ ID NO: 28533 - DNA, 25 bp, Homo sapiens
tagggaccctccttccatgactcaa

SEQ ID NO: 28534 - DNA, 25 bp, Homo sapiens
tttggattgcatctactgtataggg

SEQ ID NO: 28535 - DNA, 25 bp, Homo sapiens
accctccttccatgactcaagcttg

SEQ ID NO: 28536 - DNA, 25 bp, Homo sapiens
cttggtttctgtgattttcttttgg

SEQ ID NO: 28537 - DNA, 25 bp, Homo sapiens
atctactgtatagggaccctccttc

SEQ ID NO: 28538 - DNA, 25 bp, Homo sapiens
tttcttttggattgcatctactgta

SEQ ID NO: 28539 - DNA, 25 bp, Homo sapiens
tgatactaaccttggtttctgtgat

SEQ ID NO: 28540 - DNA, 25 bp, Homo sapiens
atctttgatactaaccttggtttct

SEQ ID NO: 28541 - DNA, 25 bp, Homo sapiens
aaggtatctttgatactaaccttgg

SEQ ID NO: 28542 - DNA, 25 bp, Homo sapiens
ttaaaaaggtatctttgatactaac

SEQ ID NO: 28543 - DNA, 20 bp, Homo sapiens
ataaaaggaaaaataaatat

SEQ ID NO: 28544 - DNA, 20 bp, Homo sapiens
gaataaaaggaaaaataaat

SEQ ID NO: 28545 - DNA, 20 bp, Homo sapiens
aactagaataaaaggaaaaa

SEQ ID NO: 28546 - DNA, 20 bp, Homo sapiens
ctttcaactagaataaaagg

SEQ ID NO: 28547 - DNA, 20 bp, Homo sapiens
gaattctttcaactagaata

SEQ ID NO: 28548 - DNA, 20 bp, Homo sapiens
attctgaattctttcaacta

SEQ ID NO: 28549 - DNA, 20 bp, Homo sapiens
tacttcatcccactgattct

SEQ ID NO: 28550 - DNA, 19 bp, Homo sapiens
ctgaaggtgttcttgtact

SEQ ID NO: 28551 - DNA, 20 bp, Homo sapiens
ctgttgcctccggttctgaa

SEQ ID NO: 28552 - DNA, 20 bp, Homo sapiens
taacatttcattcaactgtt

SEQ ID NO: 28553 - DNA, 20 bp, Homo sapiens
ttgtgttgaatcctttaaca

SEQ ID NO: 28554 - DNA, 20 bp, Homo sapiens
cttagcttccagccattgtg

SEQ ID NO: 28555 - DNA, 20 bp, Homo sapiens
ctgctcagcttcttccttag

SEQ ID NO: 28556 - DNA, 20 bp, Homo sapiens
ggcctgtcctaagacctgct

SEQ ID NO: 28557 - DNA, 20 bp, Homo sapiens
ctcaagcttggctctggcct

SEQ ID NO: 28558 - DNA, 20 bp, Homo sapiens
accctccttccatgactcaa

SEQ ID NO: 28559 - DNA, 20 bp, Homo sapiens
atctactgtatagggaccct

SEQ ID NO: 28560 - DNA, 20 bp, Homo sapiens
tttcttttggattgcatcta

SEQ ID NO: 28561 - DNA, 20 bp, Homo sapiens
cttggtttctgtgattttct

SEQ ID NO: 28562 - DNA, 20 bp, Homo sapiens
ctaaccttggtttctgtgat

SEQ ID NO: 28563 - DNA, 20 bp, Homo sapiens
tgatactaaccttggtttct

SEQ ID NO: 28564 - DNA, 20 bp, Homo sapiens
atctttgatactaaccttgg

SEQ ID NO: 28565 - DNA, 20 bp, Homo sapiens
aaggtatctttgatactaac

SEQ ID NO: 28566 - DNA, 20 bp, Homo sapiens
ttaaaaaggtatctttgata

SEQ ID NO: 28567 - DNA, 24 bp, Homo sapiens
ctatagatttttatgagaaagaga

SEQ ID NO: 28568 - DNA, 25 bp, Homo sapiens
aactgctatagatttttatgagaaa

SEQ ID NO: 28569 - DNA, 25 bp, Homo sapiens
tggccaactgctatagatttttatg

SEQ ID NO: 28570 - DNA, 25 bp, Homo sapiens
gtctttggccaactgctatagattt

SEQ ID NO: 28571 - DNA, 25 bp, Homo sapiens
cggaggtctttggccaactgctata

SEQ ID NO: 28572 - DNA, 25 bp, Homo sapiens
actggcggaggtctttggccaactg

SEQ ID NO: 28573 - DNA, 25 bp, Homo sapiens
tttgtctgccactggcggaggtctt

SEQ ID NO: 28574 - DNA, 25 bp, Homo sapiens
agtcatttgccacatctacatttgt

SEQ ID NO: 28575 - DNA, 25 bp, Homo sapiens
tttgccacatctacatttgtctgcc

SEQ ID NO: 28576 - DNA, 25 bp, Homo sapiens
ccggagaagtttcagggccaagtca

SEQ ID NO: 28577 - DNA, 25 bp, Homo sapiens
gtatcatctgcagaataatcccgga

SEQ ID NO: 28578 - DNA, 25 bp, Homo sapiens
taatcccggagaagtttcagggcca

SEQ ID NO: 28579 - DNA, 25 bp, Homo sapiens
ttatcatgtggacttttctggtatc

SEQ ID NO: 28580 - DNA, 25 bp, Homo sapiens
agaggcattgatattctctgttatc

SEQ ID NO: 28581 - DNA, 25 bp, Homo sapiens
atgtggacttttctggtatcatctg

SEQ ID NO: 28582 - DNA, 25 bp, Homo sapiens
cttttatgaatgcttctccaagagg

SEQ ID NO: 28583 - DNA, 25 bp, Homo sapiens
atattctctgttatcatgtggactt

SEQ ID NO: 28584 - DNA, 25 bp, Homo sapiens
cataccttttatgaatgcttctcca

SEQ ID NO: 28585 - DNA, 25 bp, Homo sapiens
ctccaagaggcattgatattctctg

SEQ ID NO: 28586 - DNA, 25 bp, Homo sapiens
taattcataccttttatgaatgctt

SEQ ID NO: 28587 - DNA, 25 bp, Homo sapiens
taatgtaattcataccttttatgaa

SEQ ID NO: 28588 - DNA, 25 bp, Homo sapiens
agaaataatgtaattcatacctttt

SEQ ID NO: 28589 - DNA, 25 bp, Homo sapiens
gttttagaaataatgtaattcatac

SEQ ID NO: 28590 - DNA, 19 bp, Homo sapiens
gatttttatgagaaagaga

SEQ ID NO: 28591 - DNA, 20 bp, Homo sapiens
ctatagatttttatgagaaa

SEQ ID NO: 28592 - DNA, 20 bp, Homo sapiens
aactgctatagatttttatg

SEQ ID NO: 28593 - DNA, 20 bp, Homo sapiens
tggccaactgctatagattt

SEQ ID NO: 28594 - DNA, 20 bp, Homo sapiens
gtctttggccaactgctata

SEQ ID NO: 28595 - DNA, 20 bp, Homo sapiens
cggaggtctttggccaactg

SEQ ID NO: 28596 - DNA, 20 bp, Homo sapiens
tttgtctgccactggcggag

SEQ ID NO: 28597 - DNA, 20 bp, Homo sapiens
tttgccacatctacatttgt

SEQ ID NO: 28598 - DNA, 20 bp, Homo sapiens
ttcagggccaagtcatttgc

SEQ ID NO: 28599 - DNA, 20 bp, Homo sapiens
taatcccggagaagtttcag

SEQ ID NO: 28600 - DNA, 20 bp, Homo sapiens
gtatcatctgcagaataatc

SEQ ID NO: 28601 - DNA, 20 bp, Homo sapiens
atgtggacttttctggtatc

SEQ ID NO: 28602 - DNA, 20 bp, Homo sapiens
atattctctgttatcatgtg

SEQ ID NO: 28603 - DNA, 20 bp, Homo sapiens
ctccaagaggcattgatatt

SEQ ID NO: 28604 - DNA, 20 bp, Homo sapiens
cttttatgaatgcttctcca

SEQ ID NO: 28605 - DNA, 20 bp, Homo sapiens
cataccttttatgaatgctt

SEQ ID NO: 28606 - DNA, 20 bp, Homo sapiens
taattcataccttttatgaa

SEQ ID NO: 28607 - DNA, 20 bp, Homo sapiens
taatgtaattcatacctttt

SEQ ID NO: 28608 - DNA, 20 bp, Homo sapiens
agaaataatgtaattcatac

SEQ ID NO: 28609 - DNA, 20 bp, Homo sapiens
gttttagaaataatgtaatt

SEQ ID NO: 28610 - DNA, 25 bp, Homo sapiens
ctgcaaaggaccaaatgttcagatg

SEQ ID NO: 28611 - DNA, 25 bp, Homo sapiens
tcaccctgcaaaggaccaaatgttc

SEQ ID NO: 28612 - DNA, 25 bp, Homo sapiens
ctcactcaccctgcaaaggaccaaa

SEQ ID NO: 28613 - DNA, 25 bp, Homo sapiens
tctcgctcactcaccctgcaaagga

SEQ ID NO: 28614 - DNA, 25 bp, Homo sapiens
cagcctctcgctcactcaccctgca

SEQ ID NO: 28615 - DNA, 25 bp, Homo sapiens
caaagcagcctctcgctcactcacc

SEQ ID NO: 28616 - DNA, 25 bp, Homo sapiens
tcttccaaagcagcctctcgctcac

SEQ ID NO: 28617 - DNA, 25 bp, Homo sapiens
tctatgagtttcttccaaagcagcc

SEQ ID NO: 28618 - DNA, 25 bp, Homo sapiens
gttgcagtaatctatgagtttcttc

SEQ ID NO: 28619 - DNA, 25 bp, Homo sapiens
gaactgttgcagtaatctatgagtt

SEQ ID NO: 28620 - DNA, 25 bp, Homo sapiens
ttccaggtccagggggaactgttgc

SEQ ID NO: 28621 - DNA, 25 bp, Homo sapiens
gtaagccaggcaagaaacttttcca

SEQ ID NO: 28622 - DNA, 25 bp, Homo sapiens
ccaggcaagaaacttttccaggtcc

SEQ ID NO: 28623 - DNA, 25 bp, Homo sapiens
tggcagttgtttcagcttctgtaag

SEQ ID NO: 28624 - DNA, 25 bp, Homo sapiens
ttcagcttctgtaagccaggcaaga

SEQ ID NO: 28625 - DNA, 25 bp, Homo sapiens
ggtagcatcctgtaggacattggca

SEQ ID NO: 28626 - DNA, 25 bp, Homo sapiens
gacattggcagttgtttcagcttct

SEQ ID NO: 28627 - DNA, 25 bp, Homo sapiens
tctaggagcctttccttacgggtag

SEQ ID NO: 28628 - DNA, 25 bp, Homo sapiens
cttttactcccttggagtcttctag

SEQ ID NO: 28629 - DNA, 25 bp, Homo sapiens
gagcctttccttacgggtagcatcc

SEQ ID NO: 28630 - DNA, 25 bp, Homo sapiens
ttgccattgtttcatcagctctttt

SEQ ID NO: 28631 - DNA, 25 bp, Homo sapiens
cttggagtcttctaggagcctttcc

SEQ ID NO: 28632 - DNA, 25 bp, Homo sapiens
cttacttgccattgtttcatcagct

SEQ ID NO: 28633 - DNA, 25 bp, Homo sapiens
cagctcttttactcccttggagtct

SEQ ID NO: 28634 - DNA, 25 bp, Homo sapiens
cctgacttacttgccattgtttcat

SEQ ID NO: 28635 - DNA, 25 bp, Homo sapiens
aaatgcctgacttacttgccattgt

SEQ ID NO: 28636 - DNA, 25 bp, Homo sapiens
agcggaaatgcctgacttacttgcc

SEQ ID NO: 28637 - DNA, 25 bp, Homo sapiens
gctaaagcggaaatgcctgacttac

SEQ ID NO: 28638 - DNA, 20 bp, Homo sapiens
aaggaccaaatgttcagatg

SEQ ID NO: 28639 - DNA, 20 bp, Homo sapiens
ctgcaaaggaccaaatgttc

SEQ ID NO: 28640 - DNA, 20 bp, Homo sapiens
tcaccctgcaaaggaccaaa

SEQ ID NO: 28641 - DNA, 20 bp, Homo sapiens
ctcactcaccctgcaaagga

SEQ ID NO: 28642 - DNA, 20 bp, Homo sapiens
tctcgctcactcaccctgca

SEQ ID NO: 28643 - DNA, 20 bp, Homo sapiens
cagcctctcgctcactcacc

SEQ ID NO: 28644 - DNA, 20 bp, Homo sapiens
caaagcagcctctcgctcac

SEQ ID NO: 28645 - DNA, 20 bp, Homo sapiens
tctatgagtttcttccaaag

SEQ ID NO: 28646 - DNA, 20 bp, Homo sapiens
gaactgttgcagtaatctat

SEQ ID NO: 28647 - DNA, 20 bp, Homo sapiens
ttccaggtccagggggaact

SEQ ID NO: 28648 - DNA, 20 bp, Homo sapiens
ccaggcaagaaacttttcca

SEQ ID NO: 28649 - DNA, 20 bp, Homo sapiens
ttcagcttctgtaagccagg

SEQ ID NO: 28650 - DNA, 20 bp, Homo sapiens
gacattggcagttgtttcag

SEQ ID NO: 28651 - DNA, 20 bp, Homo sapiens
ggtagcatcctgtaggacat

SEQ ID NO: 28652 - DNA, 20 bp, Homo sapiens
gagcctttccttacgggtag

SEQ ID NO: 28653 - DNA, 20 bp, Homo sapiens
cttggagtcttctaggagcc

SEQ ID NO: 28654 - DNA, 20 bp, Homo sapiens
cagctcttttactcccttgg

SEQ ID NO: 28655 - DNA, 20 bp, Homo sapiens
ttgccattgtttcatcagct

SEQ ID NO: 28656 - DNA, 20 bp, Homo sapiens
cttacttgccattgtttcat

SEQ ID NO: 28657 - DNA, 20 bp, Homo sapiens
cctgacttacttgccattgt

SEQ ID NO: 28658 - DNA, 20 bp, Homo sapiens
aaatgcctgacttacttgcc

SEQ ID NO: 28659 - DNA, 20 bp, Homo sapiens
agcggaaatgcctgacttac

SEQ ID NO: 28660 - DNA, 20 bp, Homo sapiens
gctaaagcggaaatgcctga

SEQ ID NO: 28661 - DNA, 21 bp, Homo sapiens
cacccaccatcaccctcygtg

SEQ ID NO: 28662 - DNA, 20 bp, Homo sapiens
tcaaggaagatggcatttct

SEQ ID NO: 28663 - DNA, 23 bp, Homo sapiens
cctctgtgattttataacttgat

SEQ ID NO: 28664 - DNA, 17 bp, Homo sapiens
tggcatttctagtttgg

SEQ ID NO: 28665 - DNA, 23 bp, Homo sapiens
ccagagcaggtacctccaacatc

SEQ ID NO: 28666 - DNA, 24 bp, Homo sapiens
tgttcagcttctgttagccactga

SEQ ID NO: 28667 - DNA, 19 bp, Homo sapiens
cgccgccatttctcaacag

SEQ ID NO: 28668 - DNA, 19 bp, Homo sapiens
gctgaattatttcttcccc

SEQ ID NO: 28669 - DNA, 17 bp, Homo sapiens
gcccaatgccatcctgg

SEQ ID NO: 28670 - DNA, 18 bp, Homo sapiens
ctgttgcctccggttctg

SEQ ID NO: 28671 - DNA, 30 bp, Homo sapiens
gccatcctggagttcctgtaagataccaaa

SEQ ID NO: 28672 - DNA, 30 bp, Homo sapiens
ccaatgccatcctggagttcctgtaagata

SEQ ID NO: 28673 - DNA, 30 bp, Homo sapiens
gccgctgcccaatgccatcctggagttcct

SEQ ID NO: 28674 - DNA, 30 bp, Homo sapiens
gtttgccgctgcccaatgccatcctggagt

SEQ ID NO: 28675 - DNA, 30 bp, Homo sapiens
caacagtttgccgctgcccaatgccatcct

SEQ ID NO: 28676 - DNA, 30 bp, Homo sapiens
ctgacaacagtttgccgctgcccaatgcca

SEQ ID NO: 28677 - DNA, 30 bp, Homo sapiens
tgttctgacaacagtttgccgctgcccaat

SEQ ID NO: 28678 - DNA, 30 bp, Homo sapiens
caatgttctgacaacagtttgccgctgccc

SEQ ID NO: 28679 - DNA, 30 bp, Homo sapiens
cattcaatgttctgacaacagtttgccgct

SEQ ID NO: 28680 - DNA, 30 bp, Homo sapiens
tatttcttccccagttgcattcaatgttct

SEQ ID NO: 28681 - DNA, 30 bp, Homo sapiens
gctgaattatttcttccccagttgcattca

SEQ ID NO: 28682 - DNA, 30 bp, Homo sapiens
ggattgctgaattatttcttccccagttgc

SEQ ID NO: 28683 - DNA, 30 bp, Homo sapiens
tttgaggattgctgaattatttcttcccca

SEQ ID NO: 28684 - DNA, 30 bp, Homo sapiens
gtacttcatcccactgattctgaattcttt

SEQ ID NO: 28685 - DNA, 30 bp, Homo sapiens
tcttgtacttcatcccactgattctgaatt

SEQ ID NO: 28686 - DNA, 30 bp, Homo sapiens
tgttcttgtacttcatcccactgattctga

SEQ ID NO: 28687 - DNA, 30 bp, Homo sapiens
cggttctgaaggtgttcttgtacttcatcc

SEQ ID NO: 28688 - DNA, 30 bp, Homo sapiens
ctccggttctgaaggtgttcttgtacttca

SEQ ID NO: 28689 - DNA, 30 bp, Homo sapiens
tgcctccggttctgaaggtgttcttgtact

SEQ ID NO: 28690 - DNA, 30 bp, Homo sapiens; identical to SEQ ID NO: 5354

SEQ ID NO: 28691 - DNA, 30 bp, Homo sapiens
aactgttgcctccggttctgaaggtgttct

SEQ ID NO: 28692 - DNA, 30 bp, Homo sapiens
ttcaactgttgcctccggttctgaaggtgt

SEQ ID NO: 28693 - DNA, 19 bp, Homo sapiens
ggggtggggagaaggggag

SEQ ID NO: 28694 - DNA, 19 bp, Homo sapiens
tcctcctccccttctcccc

SEQ ID NO: 28695 - DNA, 19 bp, Homo sapiens
tagcagcagcagcagcagc

SEQ ID NO: 28696 - DNA, 28 bp, Homo sapiens
ccatttctcaacagatctgtcaaatcgc

SEQ ID NO: 28697 - DNA, 28 bp, Homo sapiens
gaagtttcagggccaagtcatttgccac

SEQ ID NO: 28698 - DNA, 28 bp, Homo sapiens
caacagtttgccgctgcccaatgccatc

SEQ ID NO: 28699 - DNA, 28 bp, Homo sapiens
ttccaaagcagcctctcgctcactcacc

SEQ ID NO: 28700 - DNA, 20 bp, Homo sapiens
catttttgacctacatgtgg

SEQ ID NO: 28701 - DNA, 20 bp, Homo sapiens
tttgacctacatgtggaaag

SEQ ID NO: 28702 - DNA, 26 bp, Homo sapiens
tacatttttgacctacatgtggaaag

SEQ ID NO: 28703 - DNA, 23 bp, Homo sapiens
tacgagttgattgtcggacccag

SEQ ID NO: 28704 - DNA, 30 bp, Homo sapiens
ccattttgtgaatgttttcttttgaacatc

SEQ ID NO: 28705 - DNA, 24 bp, Homo sapiens
cccattttgtgaatgttttctttt

SEQ ID NO: 28706 - DNA, 22 bp, Homo sapiens
ttgtgcatttacccattttgtg

SEQ ID NO: 28707 - DNA, 24 bp, Homo sapiens
gaaaattgtgcatttacccatttt

SEQ ID NO: 28708 - DNA, 21 bp, Homo sapiens
gtaggtcactgaagaggttct

SEQ ID NO: 28709 - DNA, 31 bp, Homo sapiens
tcagtttatgatttccatctacgatgtcagt

SEQ ID NO: 28710 - DNA, 19 bp, Homo sapiens
cttcctggatggcttcaat

SEQ ID NO: 28711 - DNA, 19 bp, Homo sapiens
gtacattaagatggacttc

SEQ ID NO: 28712 - DNA, 29 bp, Homo sapiens
ccctgtgctagactgaccgtgatctgcag

SEQ ID NO: 28713 - DNA, 30 bp, Homo sapiens
gtaaaagaacccagcggtcttctgtccatc

SEQ ID NO: 28714 - DNA, 25 bp, Homo sapiens
gattgctttttcttttctagatccg

SEQ ID NO: 28715 - DNA, 23 bp, Homo sapiens
tgacagcctgtgaaatctgtgag

SEQ ID NO: 28716 - DNA, 20 bp, Homo sapiens
ccattacagttgtctgtgtt

SEQ ID NO: 28717 - DNA, 20 bp, Homo sapiens
taatctgcctcttcttttgg

SEQ ID NO: 28718 - DNA, 30 bp, Homo sapiens
cagcttctgagcgagtaatccagctgtgaa

SEQ ID NO: 28719 - DNA, 16 bp, Homo sapiens
tctgctggcatcttgc

SEQ ID NO: 28720 - DNA, 25 bp, Homo sapiens
gttcagttgttctgaggcttgtttg

SEQ ID NO: 28721 - DNA, 25 bp, Homo sapiens
agtagttgtcatctgctccaattgt

SEQ ID NO: 28722 - DNA, 20 bp, Homo sapiens
atattcacagacctgcaatt

SEQ ID NO: 28723 - DNA, 25 bp, Homo sapiens
agtaaaatcttgaattacctgaatt

SEQ ID NO: 28724 - DNA, 30 bp, Homo sapiens
cggctaatttcagagggcgctttcttcgac

SEQ ID NO: 28725 - DNA, 25 bp, Homo sapiens
caacttcagccatccatttcttcag

SEQ ID NO: 28726 - DNA, 23 bp, Homo sapiens
caagggcaggccattcctccttc

SEQ ID NO: 28727 - DNA, 25 bp, Homo sapiens
cagctgcttttttagaatttctgaa

SEQ ID NO: 28728 - DNA, 25 bp, Homo sapiens
ttgagttctgtctcaagtctcgaag

SEQ ID NO: 28729 - DNA, 20 bp, Homo sapiens
tatcctctgaatgtcgcatc

SEQ ID NO: 28730 - DNA, 20 bp, Homo sapiens
ggttatcctctgaatgtcgc

SEQ ID NO: 28731 - DNA, 20 bp, Homo sapiens
tctgtgccaatatgcgaatc

SEQ ID NO: 28732 - DNA, 19 bp, Homo sapiens
ccatctgttagggtctgtg

SEQ ID NO: 28733 - DNA, 18 bp, Homo sapiens
ttaaatgtctcaagttcc

SEQ ID NO: 28734 - DNA, 16 bp, Homo sapiens
gtagttccctccaacg

SEQ ID NO: 28735 - DNA, 15 bp, Homo sapiens
catgtagttccctcc

SEQ ID NO: 28736 - DNA, 30 bp, Homo sapiens
cttgtagacgctgctcaaaattggctggtt

SEQ ID NO: 28737 - DNA, 26 bp, Homo sapiens
atctctttgtcaattccatatctgta

SEQ ID NO: 28738 - DNA, 30 bp, Homo sapiens
tctgtgatactcttcaggtgcaccttctgt

SEQ ID NO: 28739 - DNA, 30 bp, Homo sapiens
tgtgatgtggtccacattctggtcaaaagt

SEQ ID NO: 28740 - DNA, 30 bp, Homo sapiens
tttcctctcgctttctctcatctgtgattc

SEQ ID NO: 28741 - DNA, 19 bp, Homo sapiens
gagccttttttcttctttg

SEQ ID NO: 28742 - DNA, 19 bp, Homo sapiens
tcctttcatctctgggctc

SEQ ID NO: 28743 - DNA, 26 bp, Homo sapiens
caagccctcagcttgcctacgcactg

SEQ ID NO: 28744 - DNA, 19 bp, Homo sapiens
ctcctctttcttcttctgc

SEQ ID NO: 28745 - DNA, 20 bp, Homo sapiens
cttcgaaactgagcaaattt

SEQ ID NO: 28746 - DNA, 17 bp, Homo sapiens
cttgtgagacatgagtg

SEQ ID NO: 28747 - DNA, 18 bp, Homo sapiens
cagagactcctcttgctt

SEQ ID NO: 28748 - DNA, 18 bp, Homo sapiens
tgctgctgtcttcttgct

SEQ ID NO: 28749 - DNA, 19 bp, Homo sapiens
ctgtagcttcaccctttcc

SEQ ID NO: 28750 - DNA, 20 bp, Homo sapiens
tgttaactttttcccattgg

SEQ ID NO: 28751 - DNA, 20 bp, Homo sapiens
cattttgttaactttttccc

SEQ ID NO: 28752 - DNA, 30 bp, Homo sapiens
cgccatttctcaacagatctgtcaaatcgc

SEQ ID NO: 28753 - DNA, 30 bp, Homo sapiens
ccgccatttctcaacagatctgtcaaatcg

SEQ ID NO: 28754 - DNA, 30 bp, Homo sapiens
gccgccatttctcaacagatctgtcaaatc

SEQ ID NO: 28755 - DNA, 30 bp, Homo sapiens
agccgccatttctcaacagatctgtcaaat

SEQ ID NO: 28756 - DNA, 30 bp, Homo sapiens
aaaacgccgccatttctcaacagatctgtc

SEQ ID NO: 28757 - DNA, 30 bp, Homo sapiens
gaaaacgccgccatttctcaacagatctgt

SEQ ID NO: 28758 - DNA, 30 bp, Homo sapiens
tgaaaacgccgccatttctcaacagatctg

SEQ ID NO: 28759 - DNA, 30 bp, Homo sapiens
atgaaaacgccgccatttctcaacagatct

SEQ ID NO: 28760 - DNA, 30 bp, Homo sapiens
cataatgaaaacgccgccatttctcaacag

SEQ ID NO: 28761 - DNA, 30 bp, Homo sapiens
atatcataatgaaaacgccgccatttctca

SEQ ID NO: 28762 - DNA, 30 bp, Homo sapiens
tatatcataatgaaaacgccgccatttctc

SEQ ID NO: 28763 - DNA, 30 bp, Homo sapiens
tgttcagcttctgttagccactgattaaat

SEQ ID NO: 28764 - DNA, 30 bp, Homo sapiens
actgttcagcttctgttagccactgattaa

SEQ ID NO: 28765 - DNA, 30 bp, Homo sapiens
gaaactgttcagcttctgttagccactgat

SEQ ID NO: 28766 - DNA, 30 bp, Homo sapiens
gtctttctgagaaactgttcagcttctgtt

SEQ ID NO: 28767 - DNA, 20 bp, Homo sapiens
tttgtatttagcatgttccc

SEQ ID NO: 28768 - DNA, 30 bp, Homo sapiens
ttgccgctgcccaatgccatcctggagttc

SEQ ID NO: 28769 - DNA, 30 bp, Homo sapiens
tttgccgctgcccaatgccatcctggagtt

SEQ ID NO: 28770 - DNA, 30 bp, Homo sapiens
agtttgccgctgcccaatgccatcctggag

SEQ ID NO: 28771 - DNA, 30 bp, Homo sapiens
cagtttgccgctgcccaatgccatcctgga

SEQ ID NO: 28772 - DNA, 30 bp, Homo sapiens
acaacagtttgccgctgcccaatgccatcc

SEQ ID NO: 28773 - DNA, 30 bp, Homo sapiens
gacaacagtttgccgctgcccaatgccatc

SEQ ID NO: 28774 - DNA, 30 bp, Homo sapiens
tgacaacagtttgccgctgcccaatgccat

SEQ ID NO: 28775 - DNA, 30 bp, Homo sapiens
tctgacaacagtttgccgctgcccaatgcc

SEQ ID NO: 28776 - DNA, 18 bp, Homo sapiens
tctgtttttgaggattgc

SEQ ID NO: 28777 - DNA, 17 bp, Homo sapiens
ccaccgcagattcaggc

SEQ ID NO: 28778 - DNA, 17 bp, Homo sapiens
tttgcagacctcctgcc

SEQ ID NO: 28779 - DNA, 19 bp, Homo sapiens
tttttctgtctgacagctg

SEQ ID NO: 28780 - DNA, 16 bp, Homo sapiens
ctgacaagatattctt

SEQ ID NO: 28781 - DNA, 21 bp, Homo sapiens
gaaattctgacaagatattct

SEQ ID NO: 28782 - DNA, 30 bp, Homo sapiens
cttcctccaaccataaaacaaattcattta

SEQ ID NO: 28783 - DNA, 30 bp, Homo sapiens
gcttcctccaaccataaaacaaattcattt

SEQ ID NO: 28784 - DNA, 30 bp, Homo sapiens
tgcttcctccaaccataaaacaaattcatt

SEQ ID NO: 28785 - DNA, 15 bp, Homo sapiens
taaaacaaattcatt

SEQ ID NO: 28786 - DNA, 30 bp, Homo sapiens
ctgcttcctccaaccataaaacaaattcat

SEQ ID NO: 28787 - DNA, 30 bp, Homo sapiens
tctgcttcctccaaccataaaacaaattca

SEQ ID NO: 28788 - DNA, 30 bp, Homo sapiens
atctgcttcctccaaccataaaacaaattc

SEQ ID NO: 28789 - DNA, 30 bp, Homo sapiens
tatctgcttcctccaaccataaaacaaatt

SEQ ID NO: 28790 - DNA, 30 bp, Homo sapiens
ttatctgcttcctccaaccataaaacaaat

SEQ ID NO: 28791 - DNA, 30 bp, Homo sapiens
gttatctgcttcctccaaccataaaacaaa

SEQ ID NO: 28792 - DNA, 30 bp, Homo sapiens
tgttatctgcttcctccaaccataaaacaa

SEQ ID NO: 28793 - DNA, 30 bp, Homo sapiens
atgttatctgcttcctccaaccataaaaca

SEQ ID NO: 28794 - DNA, 30 bp, Homo sapiens
aatgttatctgcttcctccaaccataaaac

SEQ ID NO: 28795 - DNA, 30 bp, Homo sapiens
caatgttatctgcttcctccaaccataaaa

SEQ ID NO: 28796 - DNA, 30 bp, Homo sapiens
gcaatgttatctgcttcctccaaccataaa

SEQ ID NO: 28797 - DNA, 30 bp, Homo sapiens
agcaatgttatctgcttcctccaaccataa

SEQ ID NO: 28798 - DNA, 30 bp, Homo sapiens
tagcaatgttatctgcttcctccaaccata

SEQ ID NO: 28799 - DNA, 30 bp, Homo sapiens
ctagcaatgttatctgcttcctccaaccat

SEQ ID NO: 28800 - DNA, 30 bp, Homo sapiens
actagcaatgttatctgcttcctccaacca

SEQ ID NO: 28801 - DNA, 20 bp, Homo sapiens
gttatctgcttcctccaacc

SEQ ID NO: 28802 - DNA, 19 bp, Homo sapiens
aggttcaagtgggatacta

SEQ ID NO: 28803 - DNA, 15 bp, Homo sapiens
ttccaggttcaagtg

SEQ ID NO: 28804 - DNA, 15 bp, Homo sapiens
ttagttgctgctctt

SEQ ID NO: 28805 - DNA, 20 bp, Homo sapiens
gcttttcttttagttgctgc

SEQ ID NO: 28806 - DNA, 30 bp, Homo sapiens
caggggcaactcttccaccagtaactgaaa

SEQ ID NO: 28807 - DNA, 22 bp, Homo sapiens
tccagtttcatttaattgtttg

SEQ ID NO: 28808 - DNA, 19 bp, Homo sapiens
agcacttacaagcacgggt

SEQ ID NO: 28809 - DNA, 18 bp, Homo sapiens
tcttgctcttctgggctt

SEQ ID NO: 28810 - DNA, 21 bp, Homo sapiens
ttcaagtttatcttgctcttc

SEQ ID NO: 28811 - DNA, 21 bp, Homo sapiens
cttgagcttattttcaagttt

SEQ ID NO: 28812 - DNA, 23 bp, Homo sapiens
ctgcttgagcttattttcaagtt

SEQ ID NO: 28813 - DNA, 30 bp, Homo sapiens
ttctcaggtaaagctctggaaacctgaaag

SEQ ID NO: 28814 - DNA, 21 bp, Homo sapiens
cttcaagctttttttcaagct

SEQ ID NO: 28815 - DNA, 16 bp, Homo sapiens
tttctccttgtttctc

SEQ ID NO: 28816 - DNA, 19 bp, Homo sapiens
gcttcaatttctccttgtt

SEQ ID NO: 28817 - DNA, 19 bp, Homo sapiens
tttatttgagcttcaattt

SEQ ID NO: 28818 - DNA, 19 bp, Homo sapiens
ggtcttttatttgagcttc

SEQ ID NO: 28819 - DNA, 17 bp, Homo sapiens
gctgcccaaggtctttt

SEQ ID NO: 28820 - DNA, 21 bp, Homo sapiens
cttcaaggtcttcaagctttt

SEQ ID NO: 28821 - DNA, 21 bp, Homo sapiens
taactgctcttcaaggtcttc

SEQ ID NO: 28822 - DNA, 21 bp, Homo sapiens
ttataaatttccaactgattc

SEQ ID NO: 28823 - DNA, 27 bp, Homo sapiens
ctgctatttcagtttcctggggaaaag

SEQ ID NO: 28824 - DNA, 19 bp, Homo sapiens
cttccacatccggttgttt

SEQ ID NO: 28825 - DNA, 19 bp, Homo sapiens
gtggctggtttttccttgt

SEQ ID NO: 28826 - DNA, 17 bp, Homo sapiens
ctcagagctcagatctt

SEQ ID NO: 28827 - DNA, 15 bp, Homo sapiens
ggctgctttgccctc

SEQ ID NO: 28828 - DNA, 30 bp, Homo sapiens
gtgtcaccagagtaacagtctgagtaggag

SEQ ID NO: 28829 - DNA, 30 bp, Homo sapiens
aggttgtgtcaccagagtaacagtctgagt

SEQ ID NO: 28830 - DNA, 30 bp, Homo sapiens
ccacaggttgtgtcaccagagtaacagtct

SEQ ID NO: 28831 - DNA, 30 bp, Homo sapiens
ggcagtttccttagtaaccacaggttgtgt

SEQ ID NO: 28832 - DNA, 30 bp, Homo sapiens
agatggcagtttccttagtaaccacaggtt

SEQ ID NO: 28833 - DNA, 30 bp, Homo sapiens
atggcatttctagtttggagatggcagttt

SEQ ID NO: 28834 - DNA, 20 bp, Homo sapiens
gaaagccagtcggtaagttc

SEQ ID NO: 28835 - DNA, 30 bp, Homo sapiens
ttataacttgatcaagcagagaaagccagt

SEQ ID NO: 28836 - DNA, 15 bp, Homo sapiens
cacccaccatcaccc

SEQ ID NO: 28837 - DNA, 20 bp, Homo sapiens
tgatatcctcaaggtcaccc

SEQ ID NO: 28838 - DNA, 30 bp, Homo sapiens
ataccttctgcttgatgatcatctcgttga

SEQ ID NO: 28839 - DNA, 25 bp, Homo sapiens
tccaactggggacgcctctgttcca

SEQ ID NO: 28840 - DNA, 25 bp, Homo sapiens
ttccaactggggacgcctctgttcc

SEQ ID NO: 28841 - DNA, 30 bp, Homo sapiens
ggtaatgagttcttccaactggggacgcct

SEQ ID NO: 28842 - DNA, 30 bp, Homo sapiens
ttcaaattttgggcagcggtaatgagttct

SEQ ID NO: 28843 - DNA, 18 bp, Homo sapiens
ttgctggtcttgtttttc

SEQ ID NO: 28844 - DNA, 16 bp, Homo sapiens
ccgtaatgattgttct

SEQ ID NO: 28845 - DNA, 30 bp, Homo sapiens
acttcatcccactgattctgaattctttca

SEQ ID NO: 28846 - DNA, 30 bp, Homo sapiens
tacttcatcccactgattctgaattctttc

SEQ ID NO: 28847 - DNA, 30 bp, Homo sapiens
tgtacttcatcccactgattctgaattctt

SEQ ID NO: 28848 - DNA, 30 bp, Homo sapiens
ttaaaaaggtatctttgatactaaccttgg

SEQ ID NO: 28849 - DNA, 30 bp, Homo sapiens
ttgtacttcatcccactgattctgaattct

SEQ ID NO: 28850 - DNA, 30 bp, Homo sapiens
cttgtacttcatcccactgattctgaattc

SEQ ID NO: 28851 - DNA, 30 bp, Homo sapiens
ttcttgtacttcatcccactgattctgaat

SEQ ID NO: 28852 - DNA, 30 bp, Homo sapiens
gttcttgtacttcatcccactgattctgaa

SEQ ID NO: 28853 - DNA, 30 bp, Homo sapiens
gtgttcttgtacttcatcccactgattctg

SEQ ID NO: 28854 - DNA, 30 bp, Homo sapiens
ggtgttcttgtacttcatcccactgattct

SEQ ID NO: 28855 - DNA, 30 bp, Homo sapiens
aggtgttcttgtacttcatcccactgattc

SEQ ID NO: 28856 - DNA, 30 bp, Homo sapiens
aaggtgttcttgtacttcatcccactgatt

SEQ ID NO: 28857 - DNA, 30 bp, Homo sapiens
gaaggtgttcttgtacttcatcccactgat

SEQ ID NO: 28858 - DNA, 30 bp, Homo sapiens
tgaaggtgttcttgtacttcatcccactga

SEQ ID NO: 28859 - DNA, 30 bp, Homo sapiens
ctgaaggtgttcttgtacttcatcccactg

SEQ ID NO: 28860 - DNA, 30 bp, Homo sapiens
tctgaaggtgttcttgtacttcatcccact

SEQ ID NO: 28861 - DNA, 30 bp, Homo sapiens
ttctgaaggtgttcttgtacttcatcccac

SEQ ID NO: 28862 - DNA, 30 bp, Homo sapiens
gttctgaaggtgttcttgtacttcatccca

SEQ ID NO: 28863 - DNA, 30 bp, Homo sapiens
ggttctgaaggtgttcttgtacttcatccc

SEQ ID NO: 28864 - DNA, 30 bp, Homo sapiens
ccggttctgaaggtgttcttgtacttcatc

SEQ ID NO: 28865 - DNA, 30 bp, Homo sapiens
tccggttctgaaggtgttcttgtacttcat

SEQ ID NO: 28866 - DNA, 30 bp, Homo sapiens
cctccggttctgaaggtgttcttgtacttc

SEQ ID NO: 28867 - DNA, 30 bp, Homo sapiens
gcctccggttctgaaggtgttcttgtactt

SEQ ID NO: 28868 - DNA, 30 bp, Homo sapiens
ttgcctccggttctgaaggtgttcttgtac

SEQ ID NO: 28869 - DNA, 30 bp, Homo sapiens
gttgcctccggttctgaaggtgttcttgta

SEQ ID NO: 28870 - DNA, 30 bp, Homo sapiens
cagccattgtgttgaatcctttaacatttc

SEQ ID NO: 28871 - DNA, 18 bp, Homo sapiens
ttggctctggcctgtcct

SEQ ID NO: 28872 - DNA, 19 bp, Homo sapiens
tacatttgtctgccactgg

SEQ ID NO: 28873 - DNA, 30 bp, Homo sapiens
gagaagtttcagggccaagtcatttgccac

SEQ ID NO: 28874 - DNA, 18 bp, Homo sapiens
cccggagaagtttcaggg

SEQ ID NO: 28875 - DNA, 23 bp, Homo sapiens
tctgcagaataatcccggagaag

SEQ ID NO: 28876 - DNA, 30 bp, Homo sapiens
tcttccaaagcagcctctcgctcactcacc

SEQ ID NO: 28877 - DNA, 20 bp, Homo sapiens
tgcagtaatctatgagtttc

SEQ ID NO: 28878 - DNA, 20 bp, Homo sapiens
ctgttgcagtaatctatgag

SEQ ID NO: 28879 - DNA, 20 bp, Homo sapiens
tcctgtaggacattggcagt

SEQ ID NO: 28880 - DNA, 18 bp, Homo sapiens
gagtcttctaggagcctt

SEQ ID NO: 28881 - DNA, 23 bp, Homo sapiens
tgccattgtttcatcagctcttt

SEQ ID NO: 28882 - DNA, 20 bp, Homo sapiens
ttttttggctgttttcatcc

SEQ ID NO: 28883 - DNA, 18 bp, Homo sapiens
ccttccagggatctcagg

SEQ ID NO: 28884 - DNA, 25 bp, Homo sapiens
gttatccaaacgtctttgtaacagg

SEQ ID NO: 28885 - DNA, 20 bp, Homo sapiens
gttcactccacttgaagttc

SEQ ID NO: 28886 - DNA, 30 bp, Homo sapiens
ctggcttccaaatgggacctgaaaaagaac

SEQ ID NO: 28887 - DNA, 18 bp, Homo sapiens
ttcagctgtagccacacc

SEQ ID NO: 28888 - DNA, 17 bp, Homo sapiens
taggtgcctgccggctt

SEQ ID NO: 28889 - DNA, 21 bp, Homo sapiens
ctgaactgctggaaagtcgcc

SEQ ID NO: 28890 - DNA, 22 bp, Homo sapiens
ttctttagttttcaattccctc

SEQ ID NO: 28891 - DNA, 19 bp, Homo sapiens
gagtttctctagtccttcc

SEQ ID NO: 28892 - DNA, 22 bp, Homo sapiens
tcctcaggaggcagctctaaat

SEQ ID NO: 28893 - DNA, 19 bp, Homo sapiens
ttgaagttcctggagtctt

SEQ ID NO: 28894 - DNA, 18 bp, Homo sapiens
gttctctttcagaggcgc

SEQ ID NO: 28895 - DNA, 30 bp, Homo sapiens
ctggcgagcaaggtccttgacgtggctcac

SEQ ID NO: 28896 - DNA, 19 bp, Homo sapiens
gtgctgaggttatacggtg

SEQ ID NO: 28897 - DNA, 31 bp, Homo sapiens
gggcttcatgcagctgcctgactcggtcctc

SEQ ID NO: 28898 - DNA, 18 bp, Homo sapiens
gtccctgtgggcttcatg

SEQ ID NO: 28899 - DNA, 18 bp, Homo sapiens
gtgctgagatgctggacc

SEQ ID NO: 28900 - DNA, 27 bp, Homo sapiens
gagatggctctctcccagggaccctgg

SEQ ID NO: 28901 - DNA, 16 bp, Homo sapiens
tggctctctcccaggg

SEQ ID NO: 28902 - DNA, 17 bp, Homo sapiens
gggcactttgtttggcg

SEQ ID NO: 28903 - DNA, 25 bp, Homo sapiens
tgggatggtcccagcaagttgtttg

SEQ ID NO: 28904 - DNA, 19 bp, Homo sapiens
ggtcccagcaagttgtttg

SEQ ID NO: 28905 - DNA, 21 bp, Homo sapiens
gtagagctctgtcattttggg

SEQ ID NO: 28906 - DNA, 27 bp, Homo sapiens
gcaaagggccttctgcagtcttcggag

SEQ ID NO: 28907 - DNA, 25 bp, Homo sapiens
gctcaagagatccactgcaaaaaac

SEQ ID NO: 28908 - DNA, 26 bp, Homo sapiens
gccatacgtacgtatcataaacattc

SEQ ID NO: 28909 - DNA, 25 bp, Homo sapiens
gttgtgctggtccaaggcatcacat

SEQ ID NO: 28910 - DNA, 25 bp, Homo sapiens
tctgcaggatatccatgggctggtc

SEQ ID NO: 28911 - DNA, 27 bp, Homo sapiens
gatcctccctgttcgtcccctattatg

SEQ ID NO: 28912 - DNA, 26 bp, Homo sapiens
gcgctggtcacaaaatcctgttgaac

SEQ ID NO: 28913 - DNA, 27 bp, Homo sapiens
catccagtctaggaagagggccgcttc

SEQ ID NO: 28914 - DNA, 24 bp, Homo sapiens
tgctttagactcctgtacctgata

SEQ ID NO: 28915 - DNA, 24 bp, Homo sapiens
cctctaagacagtctgcactggca

SEQ ID NO: 28916 - DNA, 24 bp, Homo sapiens
aagttgatcagagtaacgggactg

SEQ ID NO: 28917 - DNA, 19 bp, Homo sapiens
gccagaagttgatcagagt

SEQ ID NO: 28918 - DNA, 18 bp, Homo sapiens
tctactggccagaagttg

SEQ ID NO: 28919 - DNA, 27 bp, Homo sapiens
gtgtgaaagctgaggggacgaggcagg

SEQ ID NO: 28920 - DNA, 20 bp, Homo sapiens
tgagtatcatcgtgtgaaag

SEQ ID NO: 28921 - DNA, 19 bp, Homo sapiens
gcataatgttcaatgcgtg

SEQ ID NO: 28922 - DNA, 25 bp, Homo sapiens
gatccattgctgttttccatttctg

SEQ ID NO: 28923 - DNA, 18 bp, Homo sapiens
gatccattgctgttttcc

SEQ ID NO: 28924 - DNA, 21 bp, Homo sapiens
gagatgctatcatttagataa

SEQ ID NO: 28925 - DNA, 25 bp, Homo sapiens
cgaggctggctcaggggggagtcct

SEQ ID NO: 28926 - DNA, 17 bp, Homo sapiens
ctggctcaggggggagt

SEQ ID NO: 28927 - DNA, 19 bp, Homo sapiens
tcccctctttcctcactct

SEQ ID NO: 28928 - DNA, 25 bp, Homo sapiens
ggacaggcctttatgttcgtgctgc

SEQ ID NO: 28929 - DNA, 19 bp, Homo sapiens
cctttatgttcgtgctgct

SEQ ID NO: 28930 - DNA, 18 bp, Homo sapiens
ggcggcctttgtgttgac

SEQ ID NO: 28931 - DNA, 27 bp, Homo sapiens
gctgactgctgtcggacctctgtagag

SEQ ID NO: 28932 - DNA, 19 bp, Homo sapiens
gagaggtagaaggagagga

SEQ ID NO: 28933 - DNA, 19 bp, Homo sapiens
ataggctgactgctgtcgg

SEQ ID NO: 28934 - DNA, 27 bp, Homo sapiens
ctgtgcttgtgtcctggggaggactga

SEQ ID NO: 28935 - DNA, 17 bp, Homo sapiens
ttgtgtcctggggagga

SEQ ID NO: 28936 - DNA, 18 bp, Homo sapiens
tgctccatcacctcctct

SEQ ID NO: 28937 - DNA, 26 bp, Homo sapiens
tctcattggctttccaggggtatttc

SEQ ID NO: 28938 - DNA, 18 bp, Homo sapiens
gctttccaggggtatttc

SEQ ID NO: 28939 - DNA, 17 bp, Homo sapiens
cattggctttccagggg
